(19) United States
(12) Patent Application Publication
(10) Pub. No.: US 2025/0235397 A1
(43) Pub. Date: Jul. 24, 2025

(54) COMPOSITIONS AND METHODS OF USE THEREOF FOR TREATING AND PREVENTING HALITOSIS

(71) Applicant: Imvela Corp., Brooklyn, NY (US)

(72) Inventors: Raphaël Turcotte, Brooklyn, NY (US); Ravi Sheth, Brooklyn, NY (US)

(73) Assignee: Imvela Corp., Brooklyn, NY (US)

(21) Appl. No.: 19/028,696

(22) Filed: Jan. 17, 2025

Related U.S. Application Data
(63) Continuation-in-part of application No. 18/790,185, filed on Jul. 31, 2024.
(60) Provisional application No. 63/622,511, filed on Jan. 18, 2024.

(51) Int. Cl. A61K 8/99; A61Q 11/00

(52) U.S. Cl. CPC A61K 8/99; A61Q 11/00

(57) ABSTRACT

Some aspects of the disclosure relate to compositions comprising fermentates of bacterial strains capable of reducing volatile sulfur compounds (VSCs) in an environment, nutritional supplements, dental supplements, and food products containing such fermentates, and methods of use thereof.

### RELATED APPLICATIONS

[0001] This application is a continuation-in-part of U.S. application Ser. No. 18/790,185, filed Jul. 31, 2024, which claims the benefit under 35 U.S.C. § 119 (e) of U.S. Provisional Application No. 63/622,511, filed Jan. 18, 2024, the contents of each of which are incorporated by reference herein in their entirety.

### REFERENCE TO AN ELECTRONIC SEQUENCE LISTING

[0002] The contents of the electronic sequence listing (1055870005US02-SEQ-NTJ.xml; Size: 31,893,292 bytes; and Date of Creation: Jan. 17, 2025) are herein incorporated by reference in their entirety.

### BACKGROUND

[0003] Halitosis, commonly known as bad breath, is an oral health issue that affects several mammalian species, including humans and dogs. Halitosis is characterized by the buildup of compounds within the oral cavity, which emit a strong, offensive odor. The main malodorous compounds are volatile sulfur compounds (VSCs). These compounds are byproducts of bacterial metabolism. VSCs include hydrogen sulfide, methyl mercaptan, and dimethyl sulfide, all of which give off strong and unpleasant odors.

### SUMMARY

[0004] Some aspects relate to compositions comprising fermentate(s) of bacterial strains. Some aspects relate to methods of using compositions comprising fermentate(s) of bacterial strains. Such compositions and methods are based, at least in part, on the recognition that bacterial strains and fermentates thereof are able to effectively decrease volatile sulfur compounds (VSCs), which are associated with halitosis, and disrupt biofilms of VSC-producing microorganisms, thereby inhibiting continued VSC production by such microbes. While such fermentates alone are useful for reduction of VSC abundance, compositions may also comprise additional fermentates of other bacterial strains useful in treating or preventing halitosis.

[0005] For example, a composition described herein may comprise a fermentate of a bacterial strain that disrupts a biofilm of a canine oral microbe (e.g., Neisseria canis), thereby reducing the abundance of canine oral microbes and reducing ongoing VSC production by such microbes. A composition described herein may comprise a fermentate of a bacterial strain that produces an antioxidant, which can absorb free radicals of VSCs, thereby mitigating VSCs' contribution to malodor. A composition described herein may comprise a fermentate of a bacterial strain that enhances the function of one or more other bacterial strains or fermentates, such as their ability to reduce VSC abundance, inhibit VSC production, disrupt biofilms, and/or absorb free radicals of VSCs. A composition described herein may further comprise one or more additional components, such as vitamins, organic acids, polyphenols, indole-containing compounds, and phenols. In addition to the benefits of organic acids in reducing the oral microenvironment pH, thereby hindering VSC production and/or growth of VSC-producing microorganisms, such additional components may enhance the VSC-reducing ability of bacterial strains present in a composition.

[0006] Accordingly, some aspects relate to a method of treating one or more symptoms of halitosis in a subject in need thereof, the method comprising orally administering to the subject a nutritional supplement, dental supplement, or food product comprising a bacterial fermentate mixture, the bacterial fermentate mixture comprising: (i) a first fermentate of a first bacterial strain comprising a 16S rDNA sequence with at least 97% sequence identity to the nucleotide sequence of any one of SEQ ID NOs: 1-4; and (ii) a second fermentate of a second bacterial strain comprising a 16S rDNA sequence with at least 97% sequence identity to the nucleotide sequence of SEQ ID NO: 5.

[0007] In some embodiments, the bacterial fermentate mixture comprises: (i) a first fermentate of a first bacterial strain comprising a 16S rDNA sequence with at least 97% sequence identity to the nucleotide sequence of SEQ ID NO: 1; and (ii) a second fermentate of a second bacterial strain comprising a 16S rDNA sequence with at least 97% sequence identity to the nucleotide sequence of SEQ ID NO: 5.

[0008] In some embodiments, the bacterial fermentate mixture comprises: (i) a first fermentate of a first bacterial strain comprising a 16S rDNA sequence with at least 99% sequence identity to the nucleotide sequence of any one of SEQ ID NOs: 1-4; and (ii) a second fermentate of a second bacterial strain comprising a 16S rDNA sequence with at least 99% sequence identity to the nucleotide sequence of SEQ ID NO: 5.

[0009] In some embodiments, the bacterial fermentate mixture comprises: (i) a first fermentate of a first bacterial strain comprising a 16S rDNA sequence with at least 99% sequence identity to the nucleotide sequence of SEQ ID NO: 1; and (ii) a second fermentate of a second bacterial strain comprising a 16S rDNA sequence with at least 99% sequence identity to the nucleotide sequence of SEQ ID NO: 5.

[0010] In some embodiments, the bacterial fermentate mixture consists of: (i) a first fermentate of a first bacterial strain comprising a 16S rDNA sequence with at least 97% sequence identity to the nucleotide sequence of any one of SEQ ID NOs: 1-4; and (ii) a second fermentate of a second bacterial strain comprising a 16S rDNA sequence with at least 97% sequence identity to the nucleotide sequence of SEQ ID NO: 5.

[0011] In some embodiments, the bacterial fermentate mixture consists of: (i) a first fermentate of a first bacterial strain comprising a 16S rDNA sequence with at least 97% sequence identity to the nucleotide sequence of SEQ ID NO: 1; and (ii) a second fermentate of a second bacterial strain comprising a 16S rDNA sequence with at least 97% sequence identity to the nucleotide sequence of SEQ ID NO: 5.

[0012] In some embodiments, the bacterial fermentate mixture consists of: (i) a first fermentate of a first bacterial strain comprising a 16S rDNA sequence with at least 99% sequence identity to the nucleotide sequence of any one of SEQ ID NOs: 1-4; and (ii) a second fermentate of a second bacterial strain comprising a 16S rDNA sequence with at least 99% sequence identity to the nucleotide sequence of SEQ ID NO: 5.

[0013] In some embodiments, the bacterial fermentate mixture consists of: (i) a first fermentate of a first bacterial strain comprising a 16S rDNA sequence with at least 99% sequence identity to the nucleotide sequence of SEQ ID NO: 1; and (ii) a second fermentate of a second bacterial strain comprising a 16S rDNA sequence with at least 99% sequence identity to the nucleotide sequence of SEQ ID NO: 5.

[0014] In some embodiments, the first fermentate disrupts a biofilm of one or more canine oral microbes.

[0015] In some embodiments, the second fermentate reduces abundance of one or more volatile sulfur compounds (VSCs).

[0016] In some embodiments, the nutritional supplement, dental supplement, or food product reduces abundance of one or more VSCs in an oral microenvironment in the subject.

[0017] In some embodiments, the wherein the nutritional supplement, dental supplement, or food product reduces, in an oral microenvironment of the subject, abundance of one or more microorganisms that produce one or more VSCs.

[0018] In some embodiments, the subject is a dog or cat.

[0019] In some embodiments, the subject is a dog.

[0020] In some embodiments, each of the fermentates is present in the nutritional supplement, dental supplement, or food product at an amount of 1 to 500 mg.

[0021] In some embodiments, the bacterial fermentate mixture is present in the nutritional supplement, dental supplement, or food product at an incorporation rate of 0.01% to 10% w/w.

[0022] In some embodiments, the nutritional supplement, dental supplement, or food product is in the form of a gelatinized starch matrix, extruded or injection-molded dental stick, extruded or injection-molded dental chew, chew having a soft interior, powder meal topper, water additive, dry kibble or food, wet food, frozen food, liquid spray, peanut butter spread, or soft jerky chew.

[0023] Some aspects relate to a method of treating one or more symptoms of halitosis in a dog in need thereof, the method comprising orally administering to the dog a nutritional supplement, dental supplement, or food product comprising a bacterial fermentate mixture, the bacterial fermentate mixture comprising: (i) a first fermentate of a first bacterial strain comprising a 16S rDNA sequence with at least 99% sequence identity to the nucleotide sequence of SEQ ID NO: 1; and (ii) a second fermentate of a second bacterial strain comprising a 16S rDNA sequence with at least 99% sequence identity to the nucleotide sequence of SEQ ID NO: 5. In some embodiments, the first fermentate disrupts a biofilm of one or more canine oral microbes. In some embodiments, the second fermentate reduces abundance of one or more volatile sulfur compounds (VSCs).

[0024] some aspects of the present disclosure relate to a postbiotic composition comprising (a) a fermentate of a first bacterial strain comprising a 16S rDNA sequence with at least 97% sequence identity to the nucleic acid sequence of any one of SEQ ID NOs: 1-4; and (b) one or more additional fermentates, wherein each of the one or more additional fermentates are of a bacterial strain comprising a 16S rDNA sequence with at least 97% sequence identity to the nucleic acid sequence of any one of SEQ ID NO: 5-9.

[0025] In some embodiments, the bacterial strain of (a) is capable of disrupting a biofilm of one or more canine oral microbes. In some embodiments, the bacterial strain of (b) is capable of (i) producing one or more compounds able to reduce the abundance of one or more volatile sulfur compounds (VSCs); (ii) producing one or more antioxidants; (iii) enhancing a function of one or more bacterial strains. In some embodiments, the antioxidant is selected from the group consisting of a vitamin, an organic acid, a polyphenol, an indole-containing compound, and a phenol. In some embodiments, the antioxidant is reactive to the ferric ion-reducing antioxidant power assay.

[0026] Some aspects relate to a postbiotic composition comprising (a) a first fermentate of a first bacterial strain comprising a 16S rDNA sequence with at least 97% sequence identity to the nucleic acid sequence of any one of SEQ ID NOs: 1-4; and (b) a second fermentate of a second bacterial strain comprising a 16S rDNA sequence with at least 97% sequence identity to the nucleic acid sequence of SEQ ID NO: 5. In some embodiments, the composition further comprises (c) a third fermentate of a third bacterial strain comprising a 16s rDNA sequence with at least 97% sequence identity to the nucleic acid sequence of any one of SEQ ID NOs: 6-9. In some embodiments, (a) the first bacterial strain comprises a 16S rDNA sequence with at least 97% sequence identity to the nucleic acid sequence of SEQ ID NO: 1; (b) the second bacterial strain comprises a 16S rDNA sequence with at least 97% sequence identity to the nucleic acid sequence of SEQ ID NO: 5; and (c) the third bacterial strain comprises a 16S rDNA sequence with at least 97% sequence identity to the nucleic acid sequence of SEQ ID NO: 6.

[0027] In some embodiments, (a) the first bacterial strain comprises a 16S rDNA sequence with at least 97% sequence identity to the nucleic acid sequence of SEQ ID NO: 1; (b) the second bacterial strain comprises a 16S rDNA sequence with at least 97% sequence identity to the nucleic acid sequence of SEQ ID NO: 5; and (c) the third bacterial strain comprises a 16S rDNA sequence with at least 97% sequence identity to the nucleic acid sequence of SEQ ID NO: 9.

[0028] Some aspects relate to a postbiotic composition comprising (a) a first fermentate of a first bacterial strain comprising a 16S rDNA sequence with at least 97% sequence identity to the nucleic acid sequence of any one of SEQ ID NOs: 1-4; and (b) a second fermentate of a second bacterial strain comprising a 16S rDNA sequence with at least 97% sequence identity to the nucleic acid sequence of any one of SEQ ID NOs: 6-9. In some embodiments, the composition further comprises a third fermentate of a third bacterial strain comprising a 16s rDNA sequence with at least 97% sequence identity to the nucleic acid sequence of SEQ ID NO: 5.

[0029] In some embodiments, (a) the first bacterial strain comprises a 16S rDNA sequence with at least 97% sequence identity to the nucleic acid sequence of SEQ ID NO: 1; (b) the second bacterial strain comprises a 16S rDNA sequence with at least 97% sequence identity to the nucleic acid sequence of SEQ ID NO: 5; and (c) the third bacterial strain comprises a 16S rDNA sequence with at least 97% sequence identity to the nucleic acid sequence of SEQ ID NO: 6.

[0030] Some aspects relate to a postbiotic composition comprising: (a) a fermentate of a bacterial strain that disrupts an oral biofilm; and at least one of: (b)(i) a fermentate of a bacterial strain that produces one or more compounds able to reduce the abundance of one or more volatile sulfur compounds (VSCs), (b)(ii) a fermentate of a bacterial strain that produces one or more antioxidants; and (b)(iii) a fermentate of a bacterial strain that enhances a function of one or more bacterial strains.

[0031] In some embodiments, the bacterial strain of (a) is selected from the group consisting of Bacillus subtilis, Bacillus amyloliquefaciens, Bacillus licheniformis, and Bacillus pumilus. In some embodiments, the bacterial strain of (b)(i) is Pediococcus pentosaceus. In some embodiments, the bacterial strain of (b)(i) is selected from the group consisting of Pediococcus pentosaceus, Bacillus subtilis, and Lactiplantibacillus plantarum. In some embodiments, the bacterial strain of (b)(ii) is selected from the group consisting of Lactiplantibacillus plantarum, Lactobacillus delbrueckii, and Limosilactobacillus fermentum. In some embodiments, the bacterial strain of (b)(ii) is selected from the group consisting of Pediococcus pentosaceus, Lactiplantibacillus plantarum, Lactobacillus delbrueckii, and Limosilactobacillus fermentum.

[0032] In some embodiments, the bacterial strain of (iii) is selected from the group consisting of Bacillus subtilis and Lactiplantibacillus plantarum.

[0033] In some embodiments, composition reduces the abundance of one or more volatile sulfur compounds (VSCs) in an oral cavity of a subject. In some embodiments, the composition reduces the abundance of one or more volatile sulfur compound (VSC)-producing microorganisms in a subject. In some embodiments, the one or more VSC-producing microorganisms are selected from the group consisting of Fusobacterium nucleatum, Neisseria canis, Bergyella zoohelcum, Prevotella intermedia, Porphyromonas canigingivalis, Porphyromonas gingivalis, Tannerella forsythia, and Treponema denticola.

[0034] In some embodiments, the one or more VSCs are selected from the group consisting of hydrogen sulfide, methyl mercaptan, and dimethyl sulfide. In some embodiments, the composition reduces the level of gum inflammation, gingivitis, plaque, tartar, and/or dental calculus accumulation in an oral cavity of a subject. In some embodiments, the composition treats or prevents one or more symptom of halitosis in a subject. In some embodiments, each of the fermentates are in powdered form. In some embodiments, each of the fermentates are lyophilized or spray-dried.

[0035] In some embodiments, each fermentate is present in an amount of 1 to 500 mg. In some embodiments, the composition comprises a total amount of fermentate in an amount of 1 to 500 mg.

[0036] In some embodiments, the composition further comprises a carrier. In some embodiments, the carrier is maltodextrin. In some embodiments, the carrier is a tapioca-based maltodextrin.

[0037] Some aspects relate to a nutritional supplement, dental supplement, or food product comprising the composition.

[0038] Some aspects relate to a nutritional supplement, dental supplement, or food product comprising the composition at an incorporation rate of 0.01% to 10% [w/w]. Some aspects relate to a nutritional supplement, dental supplement, or food product comprising the composition at an incorporation rate of 0.1% to 2% [w/w].

[0039] In some embodiments, the nutritional supplement is a canine nutritional supplement. In some embodiments, the dental supplement is a canine nutritional supplement. In some embodiments, the nutritional supplement, dental supplement, or food product comprises a meat or animal-derived material. In some embodiments, the meat or animal-derived material is beef, chicken, eggs, turkey, lamb, fish, blood marrow, and/or bone marrow.

[0040] In some embodiments, the nutritional supplement, dental supplement, or food product further comprises a grain. In some embodiments, the grain is wheat, corn, rice, oats, and/or barley.

[0041] In some embodiments, the nutritional supplement, dental supplement, or food product further comprises a fiber. In some embodiments, the fiber is sugar beet pulp, chicory pulp, chicory, coconut endosperm fiber, wheat fiber, fructooligosaccharides, galactooligosaccharides, and/or inulin.

[0042] In some embodiments, the nutritional supplement, dental supplement, or food product further comprises algae. In some embodiments, the algae is selected from the group consisting of Ascophyllum nodosum, Spirulina, Chlorella, Ulva lactuca, Laminaria digitata and Fucus vesiculosus.

[0043] In some embodiments, the nutritional supplement, dental supplement, or food product further comprises a gelatinized starch matrix.

[0044] In some embodiments, the nutritional supplement, dental supplement, or food product reduces inflammation in a subject. In some embodiments, the nutritional supplement, dental supplement, or food product treats or prevents a symptom associated with halitosis in a subject. In some embodiments, the dental supplement is an extruded or injection-molded dental stick. In some embodiments, the dental supplement is an extruded or injection-molded dental chew. In some embodiments, the nutritional supplement or dental supplement is a chew having a soft interior.

[0045] In some embodiments, the nutritional supplement is a meal topper. In some embodiments, the nutritional supplement is a water additive. In some embodiments, the food product is an extruded kibble. In some embodiments, the food product is a fresh food. In some embodiments, the nutritional supplement is a liquid spray. In some embodiments, the nutritional supplement or food product is peanut butter spread. In some embodiments, the nutritional supplement, dental supplement, or food product is soft jerky chew.

[0046] Some aspects relate to an oral care product comprising a composition described herein.

[0047] In some embodiments, the oral care product comprises the composition at an incorporation rate of 0.01% to 10% [w/w]. In some embodiments, the oral care product comprises the composition at an incorporation rate of 0.1% to 2% [w/w]. In some embodiments, the oral care product treats or prevents a symptom associated with halitosis in a subject.

[0048] In some embodiments, the oral care product is a toothpaste. In some embodiments, the oral care product is a mouthwash. In some embodiments, the oral care product is a breath mint. In some embodiments, the oral care product is a chewing gum.

[0049] Some aspects relate to a method comprising a composition, nutritional supplement, dental supplement, or food product to a subject. In some embodiments, the administration is oral administration (e.g., consumption of the composition, nutritional supplement, dental supplement, or food product) by the subject. In some embodiments, the subject has halitosis.

[0050] In some embodiments, an oral microenvironment of the subject comprises one or more bacterial strains selected from Porphyromonas gingivalis, Prevotella intermedia, Porphyromonas canigingivalis, Tannerella forsythia, Treponema denticola, Fusobacterium nucleatum, Neisseria canis, and Bergeyella zoohelcum.

[0051] In some embodiments, administration of the composition, nutritional supplement, dental supplement, or food product: (i) reduces the abundance of one or more VSCs in an oral microenvironment of the subject; (ii) reduces inflammation in the oral microenvironment of the subject; (iii) reduces the abundance of gingivitis, plaque, tartar, and/or dental calculus in the subject; (iv) reduces the abundance of one or more microorganisms associated with the production of VSCs; (v) reduces one or more symptom associated with halitosis; and/or (vi) improves oral health of the subject.

[0052] In some embodiments, the subject is a carnivore. In some embodiments, the subject is a mammal. In some embodiments, the subject is a domesticated animal. In some embodiments, the subject is a bovine, swine, llama, alpaca, sheep, or goat. In some embodiments, the subject is a dog, cat, rabbit, guinea pig, hamster, or ferret. In some embodiments, the subject is a dog. In some embodiments, the subject is a human.

### BRIEF DESCRIPTION OF THE DRAWINGS

[0053] The accompanying drawings, which constitute a part of this specification, illustrate several embodiments of the disclosure and together with the description, serve to explain the principles of the disclosure.

[0054] FIG. 1 shows effects of fermentate compositions on VSC production Fusobacterium nucleatum, a known canine oral microbe.

[0055] FIG. 2 shows dose response of fermentate compositions on reduction of VSC production by F. nucleatum. “Dose A” corresponds to a 0.3× dose; “Dose B” corresponds to a 1× dose; and “Dose C” corresponds to 3× dose.

[0056] FIG. 3 shows disruption of biofilm of canine oral microbes by fermentate composition.

[0057] FIG. 4 shows disruption of biofilm of canine oral microbes by separate individual fermentates of Bacillus subtilis. Biofilm area after treatment with each fermentate is normalized to area following treatment with negative control (media only).

[0058] FIG. 5 shows VSC levels on Days 0 and 7 post-administration for different test groups. At each day, left bars represent Placebo, and right bars represent Canine Oral Health Postbiotic (COHP) treatment group.

[0059] FIGS. 6A and 6B show Operational Taxonomic Units (OTUs) with significant log 2 fold changes in Placebo (FIG. 6A) and COHP (FIG. 6B) treatment groups.

[0060] FIG. 7 shows normalized VSC levels from an in vitro assay after treatment with COHP or control compositions. Bars indicate the average percentage of VSCs remaining after treatment, across replicates measured in the experiment. Error bars represent the standard deviation.

[0061] FIG. 8 shows biofilm disruption in an in vitro assay after treatment with COHP or control compositions. Each point is a technical replicate. Bars indicate the average and standard deviation.

[0062] FIG. 9 shows oral VSC levels in canine subjects in a placebo-controlled clinical study evaluating the effects of COHP. The average and standard deviation of VSC measurements on each sampling day 0 (baseline), 7, and 14 is shown.

[0063] FIG. 10A shows taxa of the oral microbiome that changed in subjects receiving control (top panel) or canine oral health postbiotic (COHP) composition (lower panel), based on p-values <0.1 (FDR corrected via BH method). FIG. 10B shows diversity measurements, in terms of observed α diversity (left), evenness (middle), and Shannon diversity index (right panel). Within each group, box-and-whisker plots show data on days 0 (baseline), 7, and 14. Diversity analyses were performed using DESeq2.

[0064] FIG. 11 shows the correlation between VSC levels and perceived malodor. Points represent measurements of a single participant at a single time point. Black line represents the best fit line to the data, indicating a positive correlation between the two measurements.

### DETAILED DESCRIPTION

[0065] Aspects of the disclosure relate to compositions, nutritional supplements, dental supplements, food product, and/or oral care products comprising fermentates of one or more bacterial strains that reduce levels of volatile sulfur compounds (VSCs) in environment, inhibit VSC production by other microorganisms, and/or disrupt biofilms of VSC-producing microorganisms, and methods of use thereof. Without wishing to be bound by theory, the compositions comprising fermentates described herein are useful for reducing VSC abundance, which is associated with halitosis. Fermentates of other bacterial strains may further enhance the VSC-reducing and/or halitosis-alleviating properties of such compositions, such as by inhibiting VSC production, producing or providing antioxidants that absorb free radicals of VSCs, disrupting biofilms of VSC-producing microbes, and/or reducing or slowing accumulation of plaque, tartar, or dental calculus.

[0066] Compositions comprising fermentates of microbes such as Bacillus subtilis, Pediococcus pentosaceus, and/or Lactobacillus plantarum (among others) were found to be effective in reducing the abundance of VSCs produced by microbes associated with halitosis (e.g., Fusobacterium nucleatum), with synergistic reductions being observed when fermentates from multiple species were combined (FIG. 1). Furthermore, fermentates disrupted biofilms of other canine oral microbes associated with halitosis (e.g., Neisseria canis and Bergeyella zoohelcum) (FIG. 3). Thus, compositions containing fermentates may be useful, for example, in mitigating growth of oral microbes associated with VSC production and other consequences of unmediated halitosis, such as plaque and dental calculus accumulation.

[0067] Compositions comprising bacterial fermentates may be in any suitable form, such as a dry powder that may be combined with other compositions (e.g., combination with food prior to a meal) or in liquid form that may be added to water or combined with other compositions (e.g., combined with or applied to food prior to a meal). Compositions comprising bacterial fermentates may also be present as part of another composition, such as a pill, capsule, tablet, chewable matrix, nutritional supplement, dental supplement, food product, and/or oral care product.

[0068] This disclosure is not limited in its application to the details of construction and the arrangement of components set forth in the following description or illustrated in the drawings. The disclosure is capable of other embodiments and of being practiced or of being carried out in various ways. Also, the phraseology and terminology used herein is for the purpose of description and should not be regarded as limiting. The use of “including,” “comprising,” or “having,” “containing,” “involving,” and variations thereof herein, is meant to encompass the items listed thereafter and equivalents thereof as well as additional items.

### Bacterial Strains and Fermentates Thereof

[0069] Some aspects relate to compositions (and/or nutritional supplements, dental supplements, food product, and/or oral care products comprising a composition) comprising (a) a fermentate of a first bacterial strain comprising a 16S rDNA sequence with at least 97% sequence identity to a nucleotide sequence of any one of SEQ ID NOs: 1-4; and (b) one or more additional fermentates, each being a fermentate of a bacterial strain comprising a 16S rDNA sequence with at least 97% sequence identity to a nucleotide sequence of any one of SEQ ID NOs: 5-9.

[0070] Some aspects relate to compositions (and/or nutritional supplements, dental supplements, food product, and/or oral care products comprising a composition) comprising (a) a fermentate of a first bacterial strain belonging to a species selected from the group consisting of Bacillus subtilis, Bacillus amyloliquefaciens, Bacillus licheniformis, and Bacillus pumilus; and one or more additional fermentates, each being a fermentate of a bacterial strain belonging to a species selected from the group consisting of Pediococcus pentosaceus, Lactiplantibacillus plantarum, Lactobacillus delbrueckii, Limosilactobacillus fermentum, and Bacillus subtilis, where the Bacillus subtilis strain producing additional fermentate is different from the Bacillus subtilis producing the first fermentate.

[0071] Some aspects relate to compositions (and/or nutritional supplements, dental supplements, food product, and/or oral care products comprising a composition) comprising (a) a first fermentate of a first bacterial strain comprising a 16S rDNA sequence with at least 97% sequence identity to a nucleotide sequence of any one of SEQ ID NOs: 1-4; and (b) a second fermentate of a second bacterial strain comprising a 16S rDNA sequence comprising a 16S rDNA sequence with at least 97% sequence identity to a nucleotide sequence of SEQ ID NO: 5. In some embodiments, the composition comprises (a) a first fermentate of a first bacterial strain comprising a 16S rDNA sequence with at least 97% sequence identity to a nucleotide sequence of SEQ ID NO: 1. In some embodiments, the composition comprises (a) a first fermentate of a first bacterial strain comprising a 16S rDNA sequence with at least 97% sequence identity to a nucleotide sequence of SEQ ID NO: 2. In some embodiments, the composition comprises (a) a first fermentate of a first bacterial strain comprising a 16S rDNA sequence with at least 97% sequence identity to a nucleotide sequence of SEQ ID NO: 3. In some embodiments, the composition comprises (a) a first fermentate of a first bacterial strain comprising a 16S rDNA sequence with at least 97% sequence identity to a nucleotide sequence of SEQ ID NO: 4.

[0072] Some aspects relate to compositions (and/or nutritional supplements, dental supplements, food product, and/or oral care products comprising a composition) comprising (a) a first fermentate of a first bacterial strain belonging to a species selected from the group consisting of Bacillus subtilis, Bacillus amyloliquefaciens, Bacillus licheniformis, and Bacillus pumilus; and (b) a second fermentate of a second bacterial strain belonging to Pediococcus pentosaceus. In some embodiments, the composition comprises a first fermentate of a first bacterial strain belonging to Bacillus subtilis. In some embodiments, the composition comprises a first fermentate of a first bacterial strain belonging to Bacillus amyloliquefaciens. In some embodiments, the composition comprises a first fermentate of a first bacterial strain belonging to Bacillus licheniformis. In some embodiments, the composition comprises a first fermentate of a first bacterial strain belonging to Bacillus pumilus.

[0073] In some embodiments, the composition comprises (a) a first fermentate of a first bacterial strain comprising a 16S rDNA sequence with at least 97% sequence identity to a nucleotide sequence of SEQ ID NO: 1; (b) a second fermentate of a second bacterial strain comprising a 16S rDNA sequence comprising a 16S rDNA sequence with at least 97% sequence identity to a nucleotide sequence of SEQ ID NO: 5; and (c) a third fermentate of a third bacterial strain comprising a 16S rDNA sequence comprising a 16S rDNA sequence with at least 97% sequence identity to a nucleotide sequence of SEQ ID NO: 6.

[0074] In some embodiments, the composition comprises (a) a first fermentate of a first bacterial strain belonging to Bacillus subtilis; (b) a second fermentate of a second bacterial strain belonging to Pediococcus pentosaceus; and (c) a third fermentate of a third bacterial strain belonging to Lactobacillus plantarum.

[0075] In some embodiments, the composition comprises (a) a first fermentate of a first bacterial strain comprising a 16S rDNA sequence with at least 97% sequence identity to a nucleotide sequence of SEQ ID NO: 1; (b) a second fermentate of a second bacterial strain comprising a 16S rDNA sequence comprising a 16S rDNA sequence with at least 97% sequence identity to a nucleotide sequence of SEQ ID NO: 5; and (c) a third fermentate of a third bacterial strain comprising a 16S rDNA sequence comprising a 16S rDNA sequence with at least 97% sequence identity to a nucleotide sequence of SEQ ID NO: 9.

[0076] In some embodiments, the composition comprises (a) a first fermentate of a first bacterial strain belonging to Bacillus subtilis; (b) a second fermentate of a second bacterial strain belonging to Pediococcus pentosaceus; and (c) a third fermentate of a third bacterial strain belonging to Bacillus subtilis that is different from the first Bacillus subtilis strain.

[0077] Some aspects relate to compositions (and/or nutritional supplements, dental supplements, food product, and/or oral care products comprising a composition) comprising (a) a first fermentate of a first bacterial strain comprising a 16S rDNA sequence with at least 97% sequence identity to a nucleotide sequence of any one of SEQ ID NOs: 1-4; and (b) a second fermentate of a second bacterial strain comprising a 16S rDNA sequence with at least 97% sequence identity to a nucleotide sequence of any one of SEQ ID NOs: 6-9.

[0078] Some aspects relate to compositions (and/or nutritional supplements, dental supplements, food product, and/or oral care products comprising a composition) comprising (a) a first fermentate of a first bacterial strain belonging to a species selected from the group consisting of Bacillus subtilis, Bacillus amyloliquefaciens, Bacillus licheniformis, and Bacillus pumilus; and (b) a second fermentate of a second bacterial strain belonging to a species selected from the group consisting of Lactiplantibacillus plantarum, Lactobacillus delbrueckii, Limosilactobacillus fermentum, and Bacillus subtilis, where the Bacillus subtilis strain producing the second fermentate is different from the Bacillus subtilis producing the first fermentate.

[0079] In some embodiments, the composition comprises (a) a first fermentate of a first bacterial strain comprising a 16S rDNA sequence with at least 97% sequence identity to a nucleotide sequence of SEQ ID NO: 1, and (b) a second fermentate of a second bacterial strain comprising a 16S rDNA sequence with at least 97% sequence identity to a nucleotide sequence of SEQ ID NO: 6. In some embodiments, the composition comprises (a) a first fermentate of a first bacterial strain comprising a 16S rDNA sequence with at least 97% sequence identity to a nucleotide sequence of SEQ ID NO: 1, and (b) a second fermentate of a second bacterial strain comprising a 16S rDNA sequence with at least 97% sequence identity to a nucleotide sequence of SEQ ID NO: 7. In some embodiments, the composition comprises (a) a first fermentate of a first bacterial strain comprising a 16S rDNA sequence with at least 97% sequence identity to a nucleotide sequence of SEQ ID NO: 1, and (b) a second fermentate of a second bacterial strain comprising a 16S rDNA sequence with at least 97% sequence identity to a nucleotide sequence of SEQ ID NO: 8. In some embodiments, the composition comprises (a) a first fermentate of a first bacterial strain comprising a 16S rDNA sequence with at least 97% sequence identity to a nucleotide sequence of SEQ ID NO: 1, and (b) a second fermentate of a second bacterial strain comprising a 16S rDNA sequence with at least 97% sequence identity to a nucleotide sequence of SEQ ID NO: 9.

[0080] In some embodiments, the composition comprises (a) a first fermentate of a first bacterial strain belonging to Bacillus subtilis; and (b) a second fermentate of a second bacterial strain belonging to Lactiplantibacillus plantarum. In some embodiments, the composition comprises (a) a first fermentate of a first bacterial strain belonging to Bacillus subtilis; and (b) a second fermentate of a second bacterial strain belonging to Lactobacillus delbrueckii. In some embodiments, the composition comprises (a) a first fermentate of a first bacterial strain belonging to Bacillus subtilis; and (b) a second fermentate of a second bacterial strain belonging to Limosilactobacillus fermentum. In some embodiments, the composition comprises (a) a first fermentate of a first bacterial strain belonging to Bacillus subtilis; and (b) a second fermentate of a second bacterial strain belonging to Bacillus subtilis that is different from the first Bacillus subtilis strain.

[0081] In some embodiments, the composition further comprises a third fermentate of a third bacterial strain comprising a 16S rDNA sequence with at least 97% sequence identity to a nucleotide sequence of SEQ ID NO: 5. In some embodiments, the composition comprises (a) a first fermentate of a first bacterial strain comprising a 16S rDNA sequence with at least 97% sequence identity to a nucleotide sequence of SEQ ID NO: 1; (b) a second fermentate of a second bacterial strain comprising a 16S rDNA sequence comprising a 16S rDNA sequence with at least 97% sequence identity to a nucleotide sequence of SEQ ID NO: 5; and (c) a third fermentate of a third bacterial strain comprising a 16S rDNA sequence comprising a 16S rDNA sequence with at least 97% sequence identity to a nucleotide sequence of SEQ ID NO: 6.

[0082] In some embodiments, the composition further comprises a third fermentate of a third bacterial strain belonging to Pediococcus pentosaceus. In some embodiments, the composition comprises (a) a first fermentate of a first bacterial strain belonging to Bacillus subtilis; (b) a second fermentate of a second bacterial strain belonging to Pediococcus pentosaceus; and (c) a third fermentate of a third bacterial strain belonging to Lactiplantibacillus plantarum.

[0083] Some aspects relate to compositions (and/or nutritional supplements, dental supplements, food products, and/or oral care products comprising a composition) comprising at least three fermentates: (i) a first fermentate of a bacterial strain comprising a 16S rDNA sequence with at least 97% sequence identity to the nucleotide sequence of any one of SEQ ID NOs: 1-4; (ii) a second fermentate of a bacterial strain comprising a 16S rDNA sequence with at least 97% sequence identity to the nucleotide sequence of any one of SEQ ID NOs: 5-6; and (iii) a third fermentate of a bacterial strain comprising a 16S rDNA sequence with at least 97% sequence identity to the nucleotide sequence of any one of SEQ ID NOs: 6-8. In some embodiments, a composition comprises at least three fermentates: (i) a first fermentate of a bacterial strain comprising a 16S rDNA sequence with at least 99% sequence identity to the nucleotide sequence of any one of SEQ ID NOs: 1-4; (ii) a second fermentate of a bacterial strain comprising a 16S rDNA sequence with at least 99% sequence identity to the nucleotide sequence of any one of SEQ ID NOs: 5-6; and (iii) a third fermentate of a bacterial strain comprising a 16S rDNA sequence with at least 99% sequence identity to the nucleotide sequence of any one of SEQ ID NOs: 6-8. In some embodiments, a composition comprises at least three fermentates: (i) a first fermentate of a bacterial strain belonging to the species Bacillus subtilis, Bacillus amyloliquefaciens, Bacillus licheniformis, or Bacillus pumilus; (ii) a second fermentate of a bacterial strain belonging to the species Pediococcus pentosaceus or Lactiplantibacillus plantarum; and (iii) a third fermentate of a bacterial strain belonging to the species Lactiplantibacillus plantarum, Lactobacillus delbrueckii, or Limosilactobacillus fermentum. The skilled artisan will appreciate that each of the 24 individual combinations formed by one of the 4 options of (i), one of the 2 options of (ii), and one of the 3 options of (iii) is contemplated.

[0084] Some aspects relate to compositions (and/or nutritional supplements, dental supplements, food products, and/or oral care products comprising a composition) comprising at least three fermentates: (i) a first fermentate of a bacterial strain comprising a 16S rDNA sequence with at least 97% sequence identity to the nucleotide sequence of any one of SEQ ID NOs: 1-4; (ii) a second fermentate of a bacterial strain comprising a 16S rDNA sequence with at least 97% sequence identity to the nucleotide sequence of any one of SEQ ID NOs: 5-6; and (iii) a third fermentate of a bacterial strain comprising a 16S rDNA sequence with at least 97% sequence identity to the nucleotide sequence of SEQ ID NO: 9. In some embodiments, a composition comprises at least three fermentates: (i) a first fermentate of a bacterial strain comprising a 16S rDNA sequence with at least 99% sequence identity to the nucleotide sequence of any one of SEQ ID NOs: 1-4; (ii) a second fermentate of a bacterial strain comprising a 16S rDNA sequence with at least 99% sequence identity to the nucleotide sequence of any one of SEQ ID NOs: 5-6; and (iii) a third fermentate of a bacterial strain comprising a 16S rDNA sequence with at least 99% sequence identity to the nucleotide sequence of SEQ ID NO: 9. In some embodiments, a composition comprises at least three fermentates: (i) a first fermentate of a bacterial strain belonging to the species Bacillus subtilis, Bacillus amyloliquefaciens, Bacillus licheniformis, or Bacillus pumilus; (ii) a second fermentate of a bacterial strain belonging to the species Pediococcus pentosaceus or Lactiplantibacillus plantarum; and (iii) a third fermentate of a bacterial strain belonging to the species Bacillus subtilis. The skilled artisan will appreciate that each of the 8 individual combinations formed by one of the 4 options of (i), and one of the 2 options of (ii), with the fermentate of (iii) is contemplated.

[0085] Some aspects relate to compositions (and/or nutritional supplements, dental supplements, food products, and/or oral care products comprising a composition) comprising at least two fermentates: (i) a first fermentate of a bacterial strain comprising a 16S rDNA sequence with at least 97% sequence identity to the nucleotide sequence of any one of SEQ ID NOs: 1-4; and (ii) a second fermentate of a bacterial strain comprising a 16S rDNA sequence with at least 97% sequence identity to the nucleotide sequence of any one of SEQ ID NOs: 5-8. In some embodiments, a composition comprises at least two fermentates: (i) a first fermentate of a bacterial strain comprising a 16S rDNA sequence with at least 99% sequence identity to the nucleotide sequence of any one of SEQ ID NOs: 1-4; and (ii) a second fermentate of a bacterial strain comprising a 16S rDNA sequence with at least 99% sequence identity to the nucleotide sequence of any one of SEQ ID NOs: 5-8. In some embodiments, a composition comprises at least two fermentates: (i) a first fermentate of a bacterial strain belonging to the species Bacillus subtilis, Bacillus amyloliquefaciens, Bacillus licheniformis, or Bacillus pumilus; and (ii) a second fermentate of a bacterial strain belonging to the species Pediococcus pentosaceus, Lactiplantibacillus plantarum, Lactobacillus delbrueckii, or Limosilactobacillus fermentum. The skilled artisan will appreciate that each of the 16 individual combinations formed by one of the 4 options of (i), and one of the 4 options of (ii) is contemplated.

[0086] Some aspects relate to compositions (and/or nutritional supplements, dental supplements, food products, and/or oral care products comprising a composition) comprising (a) a fermentate of a bacterial strain that disrupts a biofilm of an oral microbe; and (b) at least one of (i) a fermentate of a bacterial strain that produces one or more compounds that are able to reduce the abundance of one or more volatile sulfur compounds (VSCs); (ii) a fermentate of a bacterial strain that produces one or more antioxidants; and/or (iii) a fermentate of a bacterial strain that enhances a function of one or more other bacterial strains that are sources of other fermentates in the composition.

[0087] In some embodiments, a bacterial strain from which a fermentate is obtained is capable of a(i) disrupting a biofilm of an oral microbe; b(i) producing one or more compounds that are able to reduce the abundance of one or more volatile sulfur compounds (VSCs); b(ii) producing one or more antioxidants; and/or b(iii) enhancing a function of one or more other bacterial strains that are sources of other fermentates of the composition. Exemplary bacterial strains determined to be capable of b(i) producing one or more compounds that are able to reduce the abundance of one or more volatile sulfur compounds (VSCs); b(ii) producing one or more antioxidants; and/or b(iii) enhancing a function of one or more other bacterial strains of a(i) and/or b(i) that are sources of other fermentates are listed below in Table 1.

TABLE 1
Exemplary bacterial strains capable of a(i) disrupting a biofilm of an oral microbe,
b(i) producing compounds that reduce the abundance of VSCs, b(ii) producing
antioxidants, and/or b(iii) enhancing functions of other bacterial strains of a(i) and b(ii).

| | | | Species | | | | |
|---|---|---|---|---|---|---|---|
| | SEQ ID | SEQ ID NO. of | Representative | | | | |
| | NO. of | Genome | Genome(s) | | | | |
| | 16S | (N50 | (GTDB Release | | | | |
| Bacterial strain | rDNA | score) | 220) | a(i) | b(i) | b(ii) | b(iii) |
| Bacillus subtilis | 1 | 10 | GCF_000009045.1 | Yes | Yes | | Yes |
| | | (141949) | GCF_002153395.1 | | | | |
| Bacillus | 2 | 11 | GCF_000196735.1 | Yes | | | |
| amyloliquefaciens | | (930313) | | | | | |
| Bacillus | 3 | 12 | GCF_000011645.1 | Yes | | | |
| licheniformis | | (605102) | | | | | |
| Bacillus pumilus | 4 | 13 | GCF_900186955.1 | Yes | | | |
| | | (1792941) | GCA_001938995.1 | | | | |
| | | | GCF_002744245.1 | | | | |
| | | | GCF_003431975.1 | | | | |
| | | | GCF_009937765.1 | | | | |
| | | | GCF_024498355.1 | | | | |
| Pediococcus | 5 | 14 | GCF_001437285.1 | | Yes | Yes | |
| pentosaceus | | (102085) | | | | | |
| Lactiplantibacillus | 6 | 15 | GCF_014131735.1 | | Yes | Yes | Yes |
| plantarum | | (164254) | GCA_000463075.2 | | | | |
| Lactobacillus | 7 | | GCA_004556255.1 | | | Yes | |
| delbrueckii | | | | | | | |
| Limosilactobacillus | 8 | 17 | GCF_013394085.1 | | | Yes | |
| fermentum | | (36270) | | | | | |
| Bacillus subtilis | 9 | 18 | GCF_000009045.1 | Yes | Yes | | Yes |
| | | (2066462) | GCF_002153395.1 | | | | |

[0088] In some embodiments, the bacterial strain of a(i) from which a fermentate is obtained disrupts a biofilm of an oral microbe. In some embodiments, the bacterial strain is selected from the group consisting of Bacillus subtilis, Bacillus amyloliquefaciens, Bacillus licheniformis, and Bacillus pumilus. In some embodiments, the bacterial strain comprises a 16S rDNA sequence with at least 97% sequence identity to any one of SEQ ID NOs: 1-4 and 9. In some embodiments, the bacterial strain is Bacillus subtilis. In some embodiments, the bacterial strain comprises a 16S rDNA sequence with at least 97% sequence identity to SEQ ID NO: 1 or 9. In some embodiments, the bacterial strain comprises a 16S rDNA sequence with at least 97% sequence identity to SEQ ID NO: 1. In some embodiments, the bacterial strain comprises a 16S rDNA sequence with at least 97% sequence identity to SEQ ID NO: 9. In some embodiments, the bacterial strain is Bacillus amyloliquefaciens. In some embodiments, the bacterial strain comprises a 16S rDNA sequence with at least 97% sequence identity to SEQ ID NO: 2. In some embodiments, the bacterial strain is Bacillus licheniformis. In some embodiments, the bacterial strain comprises a 16S rDNA sequence with at least 97% sequence identity to SEQ ID NO: 3. In some embodiments, the bacterial strain is Bacillus pumilus. In some embodiments, the bacterial strain comprises a 16S rDNA sequence with at least 97% sequence identity to SEQ ID NO: 4. In some embodiments, the bacterial strain of a(i) comprises a genome with at least 95.0% average nucleotide identity (ANI) and an alignment fraction (AF) of at least 20.0% to a reference genome of any one of Accession Nos. GCF_000009045.1, GCF_002153395.1, GCF_000196735.1, GCF_000011645.1, GCF_900186955.1, GCA_001938995.1, GCF_002744245.1, GCF_003431975.1, GCF_009937765.1, and GCF_024498355.1. In some embodiments, the bacterial strain of a(i) comprises a genome with at least 95.0%, 95.1%, 95.2%, 95.3%, 95.4%, 95.5%, 95.6%, 95.7%, 95.8%, 95.9%, 96.0%, 96.1%, 96.2%, 96.3%, 96.4%, 96.5%, 96.6%, 96.7%, 96.8%, 96.9%, 97.0%, 97.1%, 97.2%, 97.3%, 97.4%, 97.5%, 97.6%, 97.7%, 97.8%, 97.9%, 98.0%, 98.1%, 98.2%, 98.3%, 98.4%, 98.5%, 98.6%, 98.7%, 98.8%, 98.9%, 99.0%, 99.1%, 99.2%, 99.3%, 99.4%, 99.5%, 99.6%, 99.7%, 99.8%, or 99.9% ANI to a reference genome of any one of Accession Nos. GCF_000009045.1, GCF_002153395.1, GCF_000196735.1, GCF_000011645.1, GCF_900186955.1, GCA_001938995.1, GCF_002744245.1, GCF_003431975.1, GCF_009937765.1, and GCF_024498355.1. In some embodiments, the bacterial strain of a(i) comprises a genome with an AF of at least 20%, 25%, 30%, 35%, 40%, 45%, 50%, 55%, 60%, 65%, 70%, 75%, 80%, 85%, 90%, 91%, 92%, 93%, 94%, 95%, 96%, 97%, 98%, or 99% to a reference genome of any one of Accession Nos. GCF_000009045.1, GCF_002153395.1, GCF_000196735.1, GCF_000011645.1, GCF_900186955.1, GCA_001938995.1, GCF_002744245.1, GCF_003431975.1, GCF_009937765.1, and GCF_024498355.1.

[0089] In some embodiments, the bacterial strain of a(i) comprises a genome with at least 95.0% average nucleotide identity (ANI) and an alignment fraction (AF) of at least 20.0% to a reference genome of any one of SEQ ID NOs: 10, 11, 12, 13, and 18. In some embodiments, the bacterial strain of a(i) comprises a genome with at least 95.0%, 95.1%, 95.2%, 95.3%, 95.4%, 95.5%, 95.6%, 95.7%, 95.8%, 95.9%, 96.0%, 96.1%, 96.2%, 96.3%, 96.4%, 96.5%, 96.6%, 96.7%, 96.8%, 96.9%, 97.0%, 97.1%, 97.2%, 97.3%, 97.4%, 97.5%, 97.6%, 97.7%, 97.8%, 97.9%, 98.0%, 98.1%, 98.2%, 98.3%, 98.4%, 98.5%, 98.6%, 98.7%, 98.8%, 98.9%, 99.0%, 99.1%, 99.2%, 99.3%, 99.4%, 99.5%, 99.6%, 99.7%, 99.8%, or 99.9% ANI to a reference genome of any one of SEQ ID NOs: 10, 11, 12, 13, and 18. In some embodiments, the bacterial strain of a(i) comprises a genome with an AF of at least 20%, 25%, 30%, 35%, 40%, 45%, 50%, 55%, 60%, 65%, 70%, 75%, 80%, 85%, 90%, 91%, 92%, 93%, 94%, 95%, 96%, 97%, 98%, or 99% to a reference genome of any one of SEQ ID NOs: 10, 11, 12, 13, and 18.

[0090] In some embodiments, the bacterial strain of b(i) from which a fermentate is obtained is capable of producing one or more compounds that are able to reduce the abundance of one or more VSCs. In some embodiments, the bacterial strain of b(i) is selected from the group consisting of Pediococcus pentosaceus, Bacillus subtilis, and Lactiplantibacillus plantarum. In some embodiments, the bacterial strain comprises a 16S rDNA sequence with at least 97% sequence identity to any one of SEQ ID NOs: 1, 5, 6, and 9. In some embodiments, the bacterial strain is Bacillus subtilis. In some embodiments, the bacterial strain comprises a 16S rDNA sequence with at least 97% sequence identity to SEQ ID NO: 1 or 9. In some embodiments, the bacterial strain comprises a 16S rDNA sequence with at least 97% sequence identity to SEQ ID NO: 1. In some embodiments, the bacterial strain comprises a 16S rDNA sequence with at least 97% sequence identity to SEQ ID NO: 9. In some embodiments, the bacterial strain is Pediococcus pentosaceus. In some embodiments, the bacterial strain comprises a 16S rDNA sequence with at least 97% sequence identity to SEQ ID NO: 5. In some embodiments, the bacterial strain is Lactiplantibacillus plantarum. In some embodiments, the bacterial strain comprises a 16S rDNA sequence with at least 97% sequence identity to SEQ ID NO: 6. In some embodiments, the bacterial strain of b(i) comprises a genome with at least 95.0% average nucleotide identity (ANI) and an alignment fraction (AF) of at least 20.0% to a reference genome of any one of Accession Nos. GCF_000009045.1, GCF_002153395.1, GCF_001437285.1, GCF_014131735.1, and GCA_000463075.2. In some embodiments, the bacterial strain of b(i) comprises a genome with at least 95.0%, 95.1%, 95.2%, 95.3%, 95.4%, 95.5%, 95.6%, 95.7%, 95.8%, 95.9%, 96.0%, 96.1%, 96.2%, 96.3%, 96.4%, 96.5%, 96.6%, 96.7%, 96.8%, 96.9%, 97.0%, 97.1%, 97.2%, 97.3%, 97.4%, 97.5%, 97.6%, 97.7%, 97.8%, 97.9%, 98.0%, 98.1%, 98.2%, 98.3%, 98.4%, 98.5%, 98.6%, 98.7%, 98.8%, 98.9%, 99.0%, 99.1%, 99.2%, 99.3%, 99.4%, 99.5%, 99.6%, 99.7%, 99.8%, or 99.9% ANI to a reference genome of any one of Accession Nos. GCF_000009045.1, GCF_002153395.1, GCF_001437285.1, GCF_014131735.1, and GCA_000463075.2. In some embodiments, the bacterial strain of b(i) comprises a genome with an AF of at least 20%, 25%, 30%, 35%, 40%, 45%, 50%, 55%, 60%, 65%, 70%, 75%, 80%, 85%, 90%, 91%, 92%, 93%, 94%, 95%, 96%, 97%, 98%, or 99% to a reference genome of any one of Accession Nos. GCF_000009045.1, GCF_002153395.1, GCF_001437285.1, GCF_014131735.1, and GCA_000463075.2.

[0091] In some embodiments, the bacterial strain of b(i) comprises a genome with at least 95.0% average nucleotide identity (ANI) and an alignment fraction (AF) of at least 20.0% to a reference genome of any one of SEQ ID NOs: 10, 14, 15, and 18. In some embodiments, the bacterial strain of b(i) comprises a genome with at least 95.0%, 95.1%, 95.2%, 95.3%, 95.4%, 95.5%, 95.6%, 95.7%, 95.8%, 95.9%, 96.0%, 96.1%, 96.2%, 96.3%, 96.4%, 96.5%, 96.6%, 96.7%, 96.8%, 96.9%, 97.0%, 97.1%, 97.2%, 97.3%, 97.4%, 97.5%, 97.6%, 97.7%, 97.8%, 97.9%, 98.0%, 98.1%, 98.2%, 98.3%, 98.4%, 98.5%, 98.6%, 98.7%, 98.8%, 98.9%, 99.0%, 99.1%, 99.2%, 99.3%, 99.4%, 99.5%, 99.6%, 99.7%, 99.8%, or 99.9% ANI to a reference genome of any one of SEQ ID NOs: 10, 14, 15, and 18. In some embodiments, the bacterial strain of b(i) comprises a genome with an AF of at least 20%, 25%, 30%, 35%, 40%, 45%, 50%, 55%, 60%, 65%, 70%, 75%, 80%, 85%, 90%, 91%, 92%, 93%, 94%, 95%, 96%, 97%, 98%, or 99% to a reference genome of any one of SEQ ID NOs: 10, 14, 15, and 18.

[0092] In some embodiments, the bacterial strain of b(ii) from which a fermentate is obtained is capable of producing one or more antioxidants. In some embodiments, the antioxidant is selected from the group consisting of a vitamin, an organic acid, a polyphenol, an indole-containing compound, and a phenol. In some embodiments, the antioxidant is reactive to the ferric ion-reducing antioxidant power assay. See, e.g., Benzie and Strain, Methods Enzymol. 1999. 299:15-27.

[0093] In some embodiments, the antioxidant is a vitamin. In some embodiments, the vitamin is selected from vitamin A, vitamin C, vitamin B1, B2, B6, B12, vitamin D3, vitamin E, and vitamin K.

[0094] In some embodiments, the antioxidant is an organic acid. In some embodiments, the organic acid is selected from the group consisting of lactic acid, ascorbic acid, acetic acid, acrylic acid, propionic acid, pyruvic acid, and citric acid.

[0095] In some embodiments, the antioxidant is a polyphenol. In some embodiments, the polyphenol is selected from the group consisting of green tea polyphenols, tannins, resveratrol, flavonoids, and anthrocyanins.

[0096] In some embodiments, the antioxidant is an indole-containing compound. In some embodiments, the indole-containing compound is selected from the group consisting of indoleacrylic acid, indolepropionic acid, indoleacetic acid, indole-3-carbinol, indole-3-acetamine, indolealdehyde, indolelactic acid, indolepyruvate, tryptophol, and indole.

[0097] In some embodiments, the antioxidant is a phenol.

[0098] In some embodiments, the bacterial strain of b(ii) that is capable of producing one or more antioxidants is selected from the group consisting of Lactiplantibacillus plantarum, Lactobacillus delbrueckii, and Limosilactobacillus fermentum. In some embodiments, the bacterial strain that is capable of producing one or more antioxidants comprises a 16S rDNA sequence with at least 97% sequence identity to any one of SEQ ID NOs: 6-8. In some embodiments, the bacterial strain that is capable of producing one or more antioxidants is selected from the group consisting of Pediococcus pentosaceus, Lactiplantibacillus plantarum, Lactobacillus delbrueckii, and Limosilactobacillus fermentum. In some embodiments, the bacterial strain that is capable of producing one or more antioxidants comprises a 16S rDNA sequence with at least 97% sequence identity to any one of SEQ ID NOs: 5-8. In some embodiments, the bacterial strain is Lactiplantibacillus plantarum. In some embodiments, the bacterial strain comprises a 16S rDNA sequence with at least 97% sequence identity to SEQ ID NO: 6. In some embodiments, the bacterial strain is Lactobacillus delbrueckii. In some embodiments, the bacterial strain comprises a 16S rDNA sequence with at least 97% sequence identity to SEQ ID NO: 7. In some embodiments, the bacterial strain is Limosilactobacillus fermentum. In some embodiments, the bacterial strain comprises a 16S rDNA sequence with at least 97% sequence identity to SEQ ID NO: 8. In some embodiments, the bacterial strain is Pediococcus pentosaceus. In some embodiments, the bacterial strain comprises a 16S rDNA sequence with at least 97% sequence identity to SEQ ID NO: 5. In some embodiments, the bacterial strain of b(ii) comprises a genome with at least 95.0% average nucleotide identity (ANI) and an alignment fraction (AF) of at least 20.0% to a reference genome of any one of Accession Nos. GCF_001437285.1, GCF_014131735.1, GCA_000463075.2, GCA_004556255.1, and GCF_013394085.1. In some embodiments, the bacterial strain of b(ii) comprises a genome with at least 95.0%, 95.1%, 95.2%, 95.3%, 95.4%, 95.5%, 95.6%, 95.7%, 95.8%, 95.9%, 96.0%, 96.1%, 96.2%, 96.3%, 96.4%, 96.5%, 96.6%, 96.7%, 96.8%, 96.9%, 97.0%, 97.1%, 97.2%, 97.3%, 97.4%, 97.5%, 97.6%, 97.7%, 97.8%, 97.9%, 98.0%, 98.1%, 98.2%, 98.3%, 98.4%, 98.5%, 98.6%, 98.7%, 98.8%, 98.9%, 99.0%, 99.1%, 99.2%, 99.3%, 99.4%, 99.5%, 99.6%, 99.7%, 99.8%, or 99.9% ANI to a reference genome of any one of Accession Nos. GCF_001437285.1, GCF_014131735.1, GCA_000463075.2, GCA_004556255.1, and GCF_013394085.1. In some embodiments, the bacterial strain of b(ii) comprises a genome with an AF of at least 20%, 25%, 30%, 35%, 40%, 45%, 50%, 55%, 60%, 65%, 70%, 75%, 80%, 85%, 90%, 91%, 92%, 93%, 94%, 95%, 96%, 97%, 98%, or 99% to a reference genome of any one of Accession Nos. GCF_001437285.1, GCF_014131735.1, GCA_000463075.2, GCA_004556255.1, and GCF_013394085.1.

[0099] In some embodiments, the bacterial strain of b(ii) comprises a genome with at least 95.0% average nucleotide identity (ANI) and an alignment fraction (AF) of at least 20.0% to a reference genome of any one of SEQ ID NOs: 14, 15, and 17. In some embodiments, the bacterial strain of b(ii) comprises a genome with at least 95.0%, 95.1%, 95.2%, 95.3%, 95.4%, 95.5%, 95.6%, 95.7%, 95.8%, 95.9%, 96.0%, 96.1%, 96.2%, 96.3%, 96.4%, 96.5%, 96.6%, 96.7%, 96.8%, 96.9%, 97.0%, 97.1%, 97.2%, 97.3%, 97.4%, 97.5%, 97.6%, 97.7%, 97.8%, 97.9%, 98.0%, 98.1%, 98.2%, 98.3%, 98.4%, 98.5%, 98.6%, 98.7%, 98.8%, 98.9%, 99.0%, 99.1%, 99.2%, 99.3%, 99.4%, 99.5%, 99.6%, 99.7%, 99.8%, or 99.9% ANI to a reference genome of any one of SEQ ID NOs: 14, 15, and 17. In some embodiments, the bacterial strain of b(ii) comprises a genome with an AF of at least 20%, 25%, 30%, 35%, 40%, 45%, 50%, 55%, 60%, 65%, 70%, 75%, 80%, 85%, 90%, 91%, 92%, 93%, 94%, 95%, 96%, 97%, 98%, or 99% to a reference genome of any one of SEQ ID NOs: 14, 15, and 17.

[0100] In some embodiments, the bacterial strain of b(iii) from which a fermentate is obtained is capable of enhancing a function of one or more other bacterial strains that are sources of other fermentates of the composition. In some embodiments, the bacterial strain is selected from Bacillus subtilis and Lactiplantibacillus plantarum. In some embodiments, the bacterial strain comprises a 16S rDNA sequence identity to any one of SEQ ID NOs: 1, 6, or 9. In some embodiments, the bacterial strain of b(iii) comprises a genome with at least 95.0% average nucleotide identity (ANI) and an alignment fraction (AF) of at least 20.0% to a reference genome of any one of Accession Nos. GCF_000009045.1, GCF_002153395.1, GCF_014131735.1, and GCA_000463075.2. In some embodiments, the bacterial strain of b(iii) comprises a genome with at least 95.0%, 95.1%, 95.2%, 95.3%, 95.4%, 95.5%, 95.6%, 95.7%, 95.8%, 95.9%, 96.0%, 96.1%, 96.2%, 96.3%, 96.4%, 96.5%, 96.6%, 96.7%, 96.8%, 96.9%, 97.0%, 97.1%, 97.2%, 97.3%, 97.4%, 97.5%, 97.6%, 97.7%, 97.8%, 97.9%, 98.0%, 98.1%, 98.2%, 98.3%, 98.4%, 98.5%, 98.6%, 98.7%, 98.8%, 98.9%, 99.0%, 99.1%, 99.2%, 99.3%, 99.4%, 99.5%, 99.6%, 99.7%, 99.8%, or 99.9% ANI to a reference genome of any one of Accession Nos. GCF_000009045.1, GCF_002153395.1, GCF_014131735.1, and GCA_000463075.2. In some embodiments, the bacterial strain of b(iii) comprises a genome with an AF of at least 20%, 25%, 30%, 35%, 40%, 45%, 50%, 55%, 60%, 65%, 70%, 75%, 80%, 85%, 90%, 91%, 92%, 93%, 94%, 95%, 96%, 97%, 98%, or 99% to a reference genome of any one of Accession Nos. GCF_000009045.1, GCF_002153395.1, GCF_014131735.1, and GCA_000463075.2.

[0101] In some embodiments, the bacterial strain of b(iii) comprises a genome with at least 95.0% average nucleotide identity (ANI) and an alignment fraction (AF) of at least 20.0% to a reference genome of any one of SEQ ID NOs: 10, 15, and 18. In some embodiments, the bacterial strain of b(iii) comprises a genome with at least 95.0%, 95.1%, 95.2%, 95.3%, 95.4%, 95.5%, 95.6%, 95.7%, 95.8%, 95.9%, 96.0%, 96.1%, 96.2%, 96.3%, 96.4%, 96.5%, 96.6%, 96.7%, 96.8%, 96.9%, 97.0%, 97.1%, 97.2%, 97.3%, 97.4%, 97.5%, 97.6%, 97.7%, 97.8%, 97.9%, 98.0%, 98.1%, 98.2%, 98.3%, 98.4%, 98.5%, 98.6%, 98.7%, 98.8%, 98.9%, 99.0%, 99.1%, 99.2%, 99.3%, 99.4%, 99.5%, 99.6%, 99.7%, 99.8%, or 99.9% ANI to a reference genome of any one of SEQ ID NOs: 10 and 15. In some embodiments, the bacterial strain of b(iii) comprises a genome with an AF of at least 20%, 25%, 30%, 35%, 40%, 45%, 50%, 55%, 60%, 65%, 70%, 75%, 80%, 85%, 90%, 91%, 92%, 93%, 94%, 95%, 96%, 97%, 98%, or 99% to a reference genome of any one of SEQ ID NOs: 10, 15 and 18.

[0102] In some embodiments, a bacterial strain, e.g., that produces a fermentate, has a 16S rDNA sequence with at least 97.0%, 97.1%, 97.2%, 97.3%, 97.4%, 97.5%, 97.6%, 97.7%, 97.8%, 97.9%, 98.0%, 98.1%, 98.2%, 98.3%, 98.4%, 98.5%, 98.6%, 98.7%, 98.8%, 98.9%, 99.0%, 99.1%, 99.2%, 99.3%, 99.4%, 99.5%, 99.6%, 99.7%, 99.8%, 99.9%, or 100% identity to SEQ ID NO: 1. In some embodiments, the bacterial strain comprising a 16S rDNA sequence with at least 97% sequence identity to SEQ ID NO: 1 belongs to the species Bacillus subtilis. In some embodiments, the bacterial strain comprising a 16S rDNA sequence with at least 97% sequence identity to SEQ ID NO: 10 comprises a genome with at least 95.0% average nucleotide identity (ANI) and an alignment fraction (AF) of at least 20.0% to the reference genome of SEQ ID NO: 10. In some embodiments, the bacterial strain comprises a genome with at least 95.0%, 95.1%, 95.2%, 95.3%, 95.4%, 95.5%, 95.6%, 95.7%, 95.8%, 95.9%, 96.0%, 96.1%, 96.2%, 96.3%, 96.4%, 96.5%, 96.6%, 96.7%, 96.8%, 96.9%, 97.0%, 97.1%, 97.2%, 97.3%, 97.4%, 97.5%, 97.6%, 97.7%, 97.8%, 97.9%, 98.0%, 98.1%, 98.2%, 98.3%, 98.4%, 98.5%, 98.6%, 98.7%, 98.8%, 98.9%, 99.0%, 99.1%, 99.2%, 99.3%, 99.4%, 99.5%, 99.6%, 99.7%, 99.8%, or 99.9% ANI to the reference genome of SEQ ID NO: 10. In some embodiments, the bacterial strain comprises a genome with an AF of at least 20%, 25%, 30%, 35%, 40%, 45%, 50%, 55%, 60%, 65%, 70%, 75%, 80%, 85%, 90%, 91%, 92%, 93%, 94%, 95%, 96%, 97%, 98%, or 99% to the reference genome of SEQ ID NO: 10.

[0103] In some embodiments, a bacterial strain, e.g., that produces a fermentate, has a 16S rDNA sequence with at least 97.0%, 97.1%, 97.2%, 97.3%, 97.4%, 97.5%, 97.6%, 97.7%, 97.8%, 97.9%, 98.0%, 98.1%, 98.2%, 98.3%, 98.4%, 98.5%, 98.6%, 98.7%, 98.8%, 98.9%, 99.0%, 99.1%, 99.2%, 99.3%, 99.4%, 99.5%, 99.6%, 99.7%, 99.8%, 99.9%, or 100% identity to SEQ ID NO: 2. In some embodiments, the bacterial strain comprising a 16S rDNA sequence with at least 97% sequence identity to SEQ ID NO: 2 belongs to the species Bacillus amyloliquefaciens. In some embodiments, the bacterial strain comprising a 16S rDNA sequence with at least 97% sequence identity to SEQ ID NO: 11 comprises a genome with at least 95.0% average nucleotide identity (ANI) and an alignment fraction (AF) of at least 20.0% to the reference genome of SEQ ID NO: 11. In some embodiments, the bacterial strain comprises a genome with at least 95.0%, 95.1%, 95.2%, 95.3%, 95.4%, 95.5%, 95.6%, 95.7%, 95.8%, 95.9%, 96.0%, 96.1%, 96.2%, 96.3%, 96.4%, 96.5%, 96.6%, 96.7%, 96.8%, 96.9%, 97.0%, 97.1%, 97.2%, 97.3%, 97.4%, 97.5%, 97.6%, 97.7%, 97.8%, 97.9%, 98.0%, 98.1%, 98.2%, 98.3%, 98.4%, 98.5%, 98.6%, 98.7%, 98.8%, 98.9%, 99.0%, 99.1%, 99.2%, 99.3%, 99.4%, 99.5%, 99.6%, 99.7%, 99.8%, or 99.9% ANI to the reference genome of SEQ ID NO: 11. In some embodiments, the bacterial strain comprises a genome with an AF of at least 20%, 25%, 30%, 35%, 40%, 45%, 50%, 55%, 60%, 65%, 70%, 75%, 80%, 85%, 90%, 91%, 92%, 93%, 94%, 95%, 96%, 97%, 98%, or 99% to the reference genome of SEQ ID NO: 11.

[0104] In some embodiments, a bacterial strain, e.g., that produces a fermentate, has a 16S rDNA sequence with at least 97.0%, 97.1%, 97.2%, 97.3%, 97.4%, 97.5%, 97.6%, 97.7%, 97.8%, 97.9%, 98.0%, 98.1%, 98.2%, 98.3%, 98.4%, 98.5%, 98.6%, 98.7%, 98.8%, 98.9%, 99.0%, 99.1%, 99.2%, 99.3%, 99.4%, 99.5%, 99.6%, 99.7%, 99.8%, 99.9%, or 100% identity to SEQ ID NO: 3. In some embodiments, the bacterial strain comprising a 16S rDNA sequence with at least 97% sequence identity to SEQ ID NO: 3 belongs to the species Bacillus licheniformis. In some embodiments, the bacterial strain comprising a 16S rDNA sequence with at least 97% sequence identity to SEQ ID NO: 12 comprises a genome with at least 95.0% average nucleotide identity (ANI) and an alignment fraction (AF) of at least 20.0% to the reference genome of SEQ ID NO: 12. In some embodiments, the bacterial strain comprises a genome with at least 95.0%, 95.1%, 95.2%, 95.3%, 95.4%, 95.5%, 95.6%, 95.7%, 95.8%, 95.9%, 96.0%, 96.1%, 96.2%, 96.3%, 96.4%, 96.5%, 96.6%, 96.7%, 96.8%, 96.9%, 97.0%, 97.1%, 97.2%, 97.3%, 97.4%, 97.5%, 97.6%, 97.7%, 97.8%, 97.9%, 98.0%, 98.1%, 98.2%, 98.3%, 98.4%, 98.5%, 98.6%, 98.7%, 98.8%, 98.9%, 99.0%, 99.1%, 99.2%, 99.3%, 99.4%, 99.5%, 99.6%, 99.7%, 99.8%, or 99.9% ANI to the reference genome of SEQ ID NO: 12. In some embodiments, the bacterial strain comprises a genome with an AF of at least 20%, 25%, 30%, 35%, 40%, 45%, 50%, 55%, 60%, 65%, 70%, 75%, 80%, 85%, 90%, 91%, 92%, 93%, 94%, 95%, 96%, 97%, 98%, or 99% to the reference genome of SEQ ID NO: 12.

[0105] In some embodiments, a bacterial strain, e.g., that produces a fermentate, has a 16S rDNA sequence with at least 97.0%, 97.1%, 97.2%, 97.3%, 97.4%, 97.5%, 97.6%, 97.7%, 97.8%, 97.9%, 98.0%, 98.1%, 98.2%, 98.3%, 98.4%, 98.5%, 98.6%, 98.7%, 98.8%, 98.9%, 99.0%, 99.1%, 99.2%, 99.3%, 99.4%, 99.5%, 99.6%, 99.7%, 99.8%, 99.9%, or 100% identity to SEQ ID NO: 4. In some embodiments, the bacterial strain comprising a 16S rDNA sequence with at least 97% sequence identity to SEQ ID NO: 4 belongs to the species Bacillus pumilus. In some embodiments, the bacterial strain comprising a 16S rDNA sequence with at least 97% sequence identity to SEQ ID NO: 13 comprises a genome with at least 95.0% average nucleotide identity (ANI) and an alignment fraction (AF) of at least 20.0% to the reference genome of SEQ ID NO: 13. In some embodiments, the bacterial strain comprises a genome with at least 95.0%, 95.1%, 95.2%, 95.3%, 95.4%, 95.5%, 95.6%, 95.7%, 95.8%, 95.9%, 96.0%, 96.1%, 96.2%, 96.3%, 96.4%, 96.5%, 96.6%, 96.7%, 96.8%, 96.9%, 97.0%, 97.1%, 97.2%, 97.3%, 97.4%, 97.5%, 97.6%, 97.7%, 97.8%, 97.9%, 98.0%, 98.1%, 98.2%, 98.3%, 98.4%, 98.5%, 98.6%, 98.7%, 98.8%, 98.9%, 99.0%, 99.1%, 99.2%, 99.3%, 99.4%, 99.5%, 99.6%, 99.7%, 99.8%, or 99.9% ANI to the reference genome of SEQ ID NO: 13. In some embodiments, the bacterial strain comprises a genome with an AF of at least 20%, 25%, 30%, 35%, 40%, 45%, 50%, 55%, 60%, 65%, 70%, 75%, 80%, 85%, 90%, 91%, 92%, 93%, 94%, 95%, 96%, 97%, 98%, or 99% to the reference genome of SEQ ID NO: 13.

[0106] In some embodiments, a bacterial strain, e.g., that produces a fermentate, has a 16S rDNA sequence with at least 97.0%, 97.1%, 97.2%, 97.3%, 97.4%, 97.5%, 97.6%, 97.7%, 97.8%, 97.9%, 98.0%, 98.1%, 98.2%, 98.3%, 98.4%, 98.5%, 98.6%, 98.7%, 98.8%, 98.9%, 99.0%, 99.1%, 99.2%, 99.3%, 99.4%, 99.5%, 99.6%, 99.7%, 99.8%, 99.9%, or 100% identity to SEQ ID NO: 5. In some embodiments, the bacterial strain comprising a 16S rDNA sequence with at least 97% sequence identity to SEQ ID NO: 5 belongs to the species Pediococcus pentosaceus. In some embodiments, the bacterial strain comprising a 16S rDNA sequence with at least 97% sequence identity to SEQ ID NO: 14 comprises a genome with at least 95.0% average nucleotide identity (ANI) and an alignment fraction (AF) of at least 20.0% to the reference genome of SEQ ID NO: 14. In some embodiments, the bacterial strain comprises a genome with at least 95.0%, 95.1%, 95.2%, 95.3%, 95.4%, 95.5%, 95.6%, 95.7%, 95.8%, 95.9%, 96.0%, 96.1%, 96.2%, 96.3%, 96.4%, 96.5%, 96.6%, 96.7%, 96.8%, 96.9%, 97.0%, 97.1%, 97.2%, 97.3%, 97.4%, 97.5%, 97.6%, 97.7%, 97.8%, 97.9%, 98.0%, 98.1%, 98.2%, 98.3%, 98.4%, 98.5%, 98.6%, 98.7%, 98.8%, 98.9%, 99.0%, 99.1%, 99.2%, 99.3%, 99.4%, 99.5%, 99.6%, 99.7%, 99.8%, or 99.9% ANI to the reference genome of SEQ ID NO: 14. In some embodiments, the bacterial strain comprises a genome with an AF of at least 20%, 25%, 30%, 35%, 40%, 45%, 50%, 55%, 60%, 65%, 70%, 75%, 80%, 85%, 90%, 91%, 92%, 93%, 94%, 95%, 96%, 97%, 98%, or 99% to the reference genome of SEQ ID NO: 14.

[0107] In some embodiments, a bacterial strain, e.g., that produces a fermentate, has a 16S rDNA sequence with at least 97.0%, 97.1%, 97.2%, 97.3%, 97.4%, 97.5%, 97.6%, 97.7%, 97.8%, 97.9%, 98.0%, 98.1%, 98.2%, 98.3%, 98.4%, 98.5%, 98.6%, 98.7%, 98.8%, 98.9%, 99.0%, 99.1%, 99.2%, 99.3%, 99.4%, 99.5%, 99.6%, 99.7%, 99.8%, 99.9%, or 100% identity to SEQ ID NO: 6. In some embodiments, the bacterial strain comprising a 16S rDNA sequence with at least 97% sequence identity to SEQ ID NO: 6 belongs to the species Lactiplantibacillus plantarum. In some embodiments, the bacterial strain comprising a 16S rDNA sequence with at least 97% sequence identity to SEQ ID NO: 15 comprises a genome with at least 95.0% average nucleotide identity (ANI) and an alignment fraction (AF) of at least 20.0% to the reference genome of SEQ ID NO: 15. In some embodiments, the bacterial strain comprises a genome with at least 95.0%, 95.1%, 95.2%, 95.3%, 95.4%, 95.5%, 95.6%, 95.7%, 95.8%, 95.9%, 96.0%, 96.1%, 96.2%, 96.3%, 96.4%, 96.5%, 96.6%, 96.7%, 96.8%, 96.9%, 97.0%, 97.1%, 97.2%, 97.3%, 97.4%, 97.5%, 97.6%, 97.7%, 97.8%, 97.9%, 98.0%, 98.1%, 98.2%, 98.3%, 98.4%, 98.5%, 98.6%, 98.7%, 98.8%, 98.9%, 99.0%, 99.1%, 99.2%, 99.3%, 99.4%, 99.5%, 99.6%, 99.7%, 99.8%, or 99.9% ANI to the reference genome of SEQ ID NO: 15. In some embodiments, the bacterial strain comprises a genome with an AF of at least 20%, 25%, 30%, 35%, 40%, 45%, 50%, 55%, 60%, 65%, 70%, 75%, 80%, 85%, 90%, 91%, 92%, 93%, 94%, 95%, 96%, 97%, 98%, or 99% to the reference genome of SEQ ID NO: 15.

[0108] In some embodiments, a bacterial strain, e.g., that produces a fermentate, has a 16S rDNA sequence with at least 97.0%, 97.1%, 97.2%, 97.3%, 97.4%, 97.5%, 97.6%, 97.7%, 97.8%, 97.9%, 98.0%, 98.1%, 98.2%, 98.3%, 98.4%, 98.5%, 98.6%, 98.7%, 98.8%, 98.9%, 99.0%, 99.1%, 99.2%, 99.3%, 99.4%, 99.5%, 99.6%, 99.7%, 99.8%, 99.9%, or 100% identity to SEQ ID NO: 7. In some embodiments, the bacterial strain comprising a 16S rDNA sequence with at least 97% sequence identity to SEQ ID NO: 7 belongs to the species Lactobacillus delbrueckii.

[0109] In some embodiments, a bacterial strain, e.g., that produces a fermentate, has a 16S rDNA sequence with at least 97.0%, 97.1%, 97.2%, 97.3%, 97.4%, 97.5%, 97.6%, 97.7%, 97.8%, 97.9%, 98.0%, 98.1%, 98.2%, 98.3%, 98.4%, 98.5%, 98.6%, 98.7%, 98.8%, 98.9%, 99.0%, 99.1%, 99.2%, 99.3%, 99.4%, 99.5%, 99.6%, 99.7%, 99.8%, 99.9%, or 100% identity to SEQ ID NO: 8. In some embodiments, the bacterial strain comprising a 16S rDNA sequence with at least 97% sequence identity to SEQ ID NO: 8 belongs to the species Limosilactobacillus fermentum. In some embodiments, the bacterial strain comprising a 16S rDNA sequence with at least 97% sequence identity to SEQ ID NO: 17 comprises a genome with at least 95.0% average nucleotide identity (ANI) and an alignment fraction (AF) of at least 20.0% to the reference genome of SEQ ID NO: 17. In some embodiments, the bacterial strain comprises a genome with at least 95.0%, 95.1%, 95.2%, 95.3%, 95.4%, 95.5%, 95.6%, 95.7%, 95.8%, 95.9%, 96.0%, 96.1%, 96.2%, 96.3%, 96.4%, 96.5%, 96.6%, 96.7%, 96.8%, 96.9%, 97.0%, 97.1%, 97.2%, 97.3%, 97.4%, 97.5%, 97.6%, 97.7%, 97.8%, 97.9%, 98.0%, 98.1%, 98.2%, 98.3%, 98.4%, 98.5%, 98.6%, 98.7%, 98.8%, 98.9%, 99.0%, 99.1%, 99.2%, 99.3%, 99.4%, 99.5%, 99.6%, 99.7%, 99.8%, or 99.9% ANI to the reference genome of SEQ ID NO: 17. In some embodiments, the bacterial strain comprises a genome with an AF of at least 20%, 25%, 30%, 35%, 40%, 45%, 50%, 55%, 60%, 65%, 70%, 75%, 80%, 85%, 90%, 91%, 92%, 93%, 94%, 95%, 96%, 97%, 98%, or 99% to the reference genome of SEQ ID NO: 17.

[0110] In some embodiments, a bacterial strain, e.g., that produces a fermentate, has a 16S rDNA sequence with at least 97.0%, 97.1%, 97.2%, 97.3%, 97.4%, 97.5%, 97.6%, 97.7%, 97.8%, 97.9%, 98.0%, 98.1%, 98.2%, 98.3%, 98.4%, 98.5%, 98.6%, 98.7%, 98.8%, 98.9%, 99.0%, 99.1%, 99.2%, 99.3%, 99.4%, 99.5%, 99.6%, 99.7%, 99.8%, 99.9%, or 100% identity to SEQ ID NO: 9. In some embodiments, the bacterial strain comprising a 16S rDNA sequence with at least 97% sequence identity to SEQ ID NO: 9 belongs to the species Bacillus subtilis. In some embodiments, the bacterial strain comprising a 16S rDNA sequence with at least 97% sequence identity to SEQ ID NO: 18 comprises a genome with at least 95.0% average nucleotide identity (ANI) and an alignment fraction (AF) of at least 20.0% to the reference genome of SEQ ID NO: 18. In some embodiments, the bacterial strain comprises a genome with at least 95.0%, 95.1%, 95.2%, 95.3%, 95.4%, 95.5%, 95.6%, 95.7%, 95.8%, 95.9%, 96.0%, 96.1%, 96.2%, 96.3%, 96.4%, 96.5%, 96.6%, 96.7%, 96.8%, 96.9%, 97.0%, 97.1%, 97.2%, 97.3%, 97.4%, 97.5%, 97.6%, 97.7%, 97.8%, 97.9%, 98.0%, 98.1%, 98.2%, 98.3%, 98.4%, 98.5%, 98.6%, 98.7%, 98.8%, 98.9%, 99.0%, 99.1%, 99.2%, 99.3%, 99.4%, 99.5%, 99.6%, 99.7%, 99.8%, or 99.9% ANI to the reference genome of SEQ ID NO: 18. In some embodiments, the bacterial strain comprises a genome with an AF of at least 20%, 25%, 30%, 35%, 40%, 45%, 50%, 55%, 60%, 65%, 70%, 75%, 80%, 85%, 90%, 91%, 92%, 93%, 94%, 95%, 96%, 97%, 98%, or 99% to the reference genome of SEQ ID NO: 18.

[0111] The bacterial strain comprising a 16S rDNA sequence provided by SEQ ID NO: 1 (also referred to herein as “Strain 1”) has the highest homology with a bacterial strain of the species Bacillus subtilis:

Strain 1 16S ribosomal RNA coding sequence
(16S rDNA)
(SEQ ID NO: 1)
ATGTTAGCGGCGGACGGGTGAGTAACACGTGGGTAACCTGCCTGTAAGAC
TGGGATAACTCCGGGAAACCGGGGCTAATACCGGATGGTTGTTTGAACCG
CATGGITCAAACATAAAAGGTGGCTTCGGCTACCACTTACAGATGGACCC
GCGGCGCATTAGCTAGTTGGTGAGGTAACGGCTCACCAAGGCAACGATGC
GTAGCCGACCTGAGAGGGTGATCGGCCACACTGGGACTGAGACACGGCCC
AGACTCCTACGGGAGGCAGCAGTAGGGAATCTTCCGCAATGGACGAAAGT
CTGACGGAGCAACGCCGCGTGAGTGATGAAGGTTTTCGGATCGTAAAGCT
CTGTTGTTAGGGAAGAACAAGTACCGTTCGAATAGGGCGGTACCTTGACG
GTACCTAACCAGAAAGCCACGGCTAACTACGTGCCAGCAGCCGCGGTAAT
ACGTAGGTGGCAAGCGTTGTCCGGAATTATTGGGCGTAAAGGGCTCGCAG
GCGGTTTCTTAAGTCTGATGTGAAAGCCCCCGGCTCAACCGGGGAGGGTC
ATTGGAAACTGGGGAACTTGAGTGCAGAAGAGGAGAGTGGAATTCCACGT
GTAGCGGTGAAATGCGTAGAGATGTGGAGGAACACCAGTGGCGAAGGCGA
CTCTCTGGTCTGTAACTGACGCTGAGGAGCGAAAGCGTGGGGAGCGAACA
GGATTAGATACCCTGGTAGTCCACGCCGTAAACGATGAGTGCTAAGTGTT
AGGGGGTTTCCGCCCCTTAGTGCTGCAGCTAACGCATTAAGCACTCCGCC
TGGGGAGTACGGTCGCAAGACTGAAACTCAAAGGAATTGACGGGGGCCCG
CACAAGCGGTGGAGCATGTGGTTTAATTCGAAGCAACGCGAAGAACCTTA
CCAGGTCTTGACATCCTCTGACAATCCTAGAGATAGGACGTCCCCTTCGG
GGGCAGAGTGACAGGTGGTGCATGGITGTCGTCAGCTCGTGTCGTGAGAT
GTTGGGTTAAGTCCCGCAACGAGCGCAACCCTTGATCTTAGTTGCCAGCA
TTCAGTTGGGCACTCTAAGGTGACTGCCGGTGACAAACCGGAGGAAGGTG
GGGATGACGTCAAATCATCATGCCCCTTATGACCTGGGCTACACACGTGC
TACAATGGACAGAACAAAGGGCAGCGAAACCGCGAGGTTAAGCCAATCCC
ACAAATCTGTTCTCAGTTCGGATCGCAGTCTGCAACTCGACTGCGTGAAG
CTGGAATCGCTAGTAATCGCGGATCAGCATGCCGCGGTGAATACGTTCCC
GGGCCTTGTACACACCGCCCGTCACACCACGAGAGTTTGTAACACCCGAA
GTCGGTGAGGTAACCTTTTAGGAGCCAGCCGCCGAAGGTGGGACAGATGA
TTGGGGTGAAGTCGTAACAAGGTAGCCGTATCGGAAGGTGCGGCTGGATC
ACCTCCTTT

[0112] The bacterial strain comprising a 16S rDNA sequence provided by SEQ ID NO: 2 (also referred to herein as “Strain 2”) has the highest homology with a bacterial strain of the species Bacillus amyloliquefaciens:

Strain 2 16S ribosomal RNA coding sequence
(16S rDNA)
(SEQ ID NO: 2)
CGGAGAGTTTGATCCTGGCTCAGGACGAACGCTGGCGGCGTGCCTAATAC
ATGCAAGTCGAGCGGACAGATGGGAGCTTGCTCCCTGATGTTAGCGGCGG
ACGGGTGAGTAACACGTGGGTAACCTGCCTGTAAGACTGGGATAACTCCG
GGAAACCGGGGCTAATACCGGATGCTTGTTTGAACCGCATGGTTCAAACA
TAAAAGGTGGCTTCGGCTACCACTTACAGATGGACCCGCGGCGCATTAGC
TAGTTGGTGAGGTAACGGCTCACCAAGGCGACGATGCGTAGCCGACCTGA
GAGGGTGATCGGCCACACTGGGACTGAGACACGGCCCAGACTCCTACGGG
AGGCAGCAGTAGGGAATCTTCCGCAATGGACGAAAGTCTGACGGAGCAAC
GCCGCGTGAGTGATGAAGGTTTTCGGATCGTAAAGCTCTGTTGTTAGGGA
AGAACAAGTGCCGTTCAAATAGGGCGGCACCTTGACGGTACCTAACCAGA
AAGCCACGGCTAACTACGTGCCAGCAGCCGCGGTAATACGTAGGTGGCAA
GCGTTGTCCGGAATTATTGGGCGTAAAGGGCTCGCAGGCGGTTTCTTAAG
TCTGATGTGAAAGCCCCCGGCTCAACCGGGGAGGGTCATTGGAAACTGGG
GAACTTGAGTGCAGAAGAGGAGAGTGGAATTCCACGTGTAGCGGTGAAAT
GCGTAGAGATGTGGAGGAACACCAGTGGCGAAGGCGACTCTCTGGTCTGT
AACTGACGCTGAGGAGCGAAAGCGTGGGGAGCGAACAGGATTAGATACCC
TGGTAGTCCACGCCGTAAACGATGAGTGCTAAGTGTTAGGGGGTTTCCGC
CCCTTAGTGCTGCAGCTAACGCATTAAGCACTCCGCCTGGGGAGTACGGT
CGCAAGACTGAAACTCAAAGGAATTGACGGGGGCCCGCACAAGCGGTGGA
GCATGTGGTTTAATTCGAAGCAACGCGAAGAACCTTACCAGGTCTTGACA
TCCTCTGACAATCCTAGAGATAGGACGTCCCCTTCGGGGGCAGAGTGACA
GGTGGTGCATGGTTGTCGTCAGCTCGTGTCGTGAGATGTTGGGTTAAGTC
CCGCAACGAGCGCAACCCTTGATCTTAGTTGCCAGCATTCAGTTGGGCAC
TCTAAGGTGACTGCCGGTGACAAACCGGAGGAAGGTGGGGATGACGTCAA
ATCATCATGCCCCTTATGACCTGGGCTACACACGTGCTACAATGGGCAGA
ACAAAGGGCAGCGAAACCGCGAGGTTAAGCCAATCCCACAAATCTGTTCT
CAGTTCGGATCGCAGTCTGCAACTCGACTGCGTGAAGCTGGAATCGCTAG
TAATCGCGGATCAGCATGCCGCGGTGAATACGTTCCCGGGCCTTGTACAC
ACCGCCCGTCACACCACGAGAGTTTGTAACACCCGAAGTCGGTGAGGTAA
CCTTTTTGGAGCCAGCCGCCGAAGGTGGGACAGATGATTGGGGTGAAGTC
GTAACAAGGTAGCCGTATCGGAAGGTGCGGCTGGATCACCTCCTTT

[0113] The bacterial strain comprising a 16S rDNA sequence provided by SEQ ID NO: 3 (also referred to herein as “Strain 3”) has the highest homology with a bacterial strain of the species Bacillus licheniformis:

Strain 3 16S ribosomal RNA coding sequence
(16S rDNA)
(SEQ ID NO: 3)
CACTTACAGATGGACCCGCGGCGCATTAGCTAGTTGGTGAGGTAACGGCT
CACCAAGGCGACGATGCGTAGCCGACCTGAGAGGGTGATCGGCCACACTG
GGACTGAGACACGGCCCAGACTCCTACGGGAGGCAGCAGTAGGGAATCTT
CCGCAATGGACGAAAGTCTGACGGAGCAACGCCGCGTGAGTGATGAAGGT
TTTCGGATCGTAAAACTCTGTTGTTAGGGAAGAACAAGTACCGTTCGAAT
AGGGCGGTACCTTGACGGTACCTAACCAGAAAGCCACGGCTAACTACGTG
CCAGCAGCCGCGGTAATACGTAGGTGGCAAGCGTTGTCCGGAATTATTGG
GCGTAAAGCGCGCGCAGGCGGTTTCTTAAGTCTGATGTGAAAGCCCCCGG
CTCAACCGGGGAGGGTCATTGGAAACTGGGGAACTTGAGTGCAGAAGAGG
AGAGTGGAATTCCACGTGTAGCGGTGAAATGCGTAGAGATGTGGAGGAAC
ACCAGTGGCGAAGGCGACTCTCTGGTCTGTAACTGACGCTGAGGCGCGAA
AGCGTGGGGAGCGAACAGGATTAGATACCCTGGTAGTCCACGCCGTAAAC
GATGAGTGCTAAGTGTTAGAGGGTTTCCGCCCTTTAGTGCTGCAGCAAAC
GCATTAAGCACTCCGCCTGGGGAGTACGGTCGCAAGACTGAAACTCAAAG
GAATTGACGGGGGCCCGCACAAGCGGTGGAGCATGTGGTTTAATTCGAAG
CAACGCGAAGAACCTTACCAGGTCTTGACATCCTCTGACAACCCTAGAGA
TAGGGCTTCCCCTTCGGGGGCAGAGTGACAGGTGGTGCATGGTTGTCGTC
AGCTCGTGTCGTGAGATGTTGGGTTAAGTCCCGCAACGAGCGCAACCCTT
GATCTTAGTTGCCAGCATTCAGTTGGGCACTCTAAGGTGACTGCCGGTGA
CAAACCGGAGGAAGGTGGGGATGACGTCAAATCATCATGCCCCTTATGAC
CTGGGCTACACACGTGCTACAATGGGCAGAACAAAGGGCAGCGAAGCCGC
GAGGCTAAGCCAATCCCACAAATCTGTTCTCAGTTCGGATCGCAGTCTGC
AACTCGACTGCGTGAAGCTGGAATCGCTAGTAATCGCGGATCAGCATGCC
GCGGTGAATACGTTCCCGGGCCTTGTACACACCGCCCGTCACACCACGAG
AGTTTGTAACACCCGAAGTCGGTGAGGTAACCTTTTGGAGCCAGCCGCCG
AAGGTGGGACAGATGATTGGGGTGAAGTCGTAACAAGGTAGCCGTATCGG
AAGGTGCGGCTGGATCACCTCCTTT

[0114] The bacterial strain comprising a 16S rDNA sequence provided by SEQ ID NO: 4 (also referred to herein as “Strain 4”) has the highest homology with a bacterial strain of the species Bacillus pumilus:

Strain 4 16S ribosomal RNA coding sequence
(16S rDNA)
(SEQ ID NO: 4)
ACGCTGGCGGCGTGCCTAATACATGCAAGTCGAGCGGACAGAAGGGAGCT
TGCTCCCGGATGTTAGCGGCGGACGGGTGAGTAACACGTGGGTAACCTGC
CTGTAAGACTGGGATAACTCCGGGAAACCGGAGCTAATACCGGATAGTTC
CTTGAACCGCATGGTTCAAGGATGAAAGACGGTTTCGGCTGTCACTTACA
GATGGACCCGCGGCGCATTAGCTAGTTGGTGGGGTAATGGCTCACCAAGG
CGACGATGCGTAGCCGACCTGAGAGGGTGATCGGCCACACTGGGACTGAG
ACACGGCCCAGACTCCTACGGGAGGCAGCAGTAGGGAATCTTCCGCAATG
GACGAAAGTCTGACGGAGCAACGCCGCGTGAGTGATGAAGGTTTTCGGAT
CGTAAAGCTCTGTTGTTAGGGAAGAACAAGTGCGAGAGTAACTGCTCGCA
CCTTGACGGTACCTAACCAGAAAGCCACGGCTAACTACGTGCCAGCAGCC
GCGGTAATACGTAGGTGGCAAGCGTTGTCCGGAATTATTGGGCGTAAAGG
GCTCGCAGGCGGITTCTTAAGTCTGATGTGAAAGCCCCCGGCTCAACCGG
GGAGGGTCATTGGAAACTGGGAAACTTGAGTGCAGAAGAGGAGAGTGGAA
TTCCACGTGTAGCGGTGAAATGCGTAGAGATGTGGAGGAACACCAGTGGC
GAAGGCGACTCTCTGGTCTGTAACTGACGCTGAGGAGCGAAAGCGTGGGG
AGCGAACAGGATTAGATACCCTGGTAGTCCACGCCGTAAACGATGAGTGC
TAAGTGTTAGGGGGTTTCCGCCCCTTAGTGCTGCAGCTAACGCATTAAGC
ACTCCGCCTGGGGAGTACGGTCGCAAGACTGAAACTCAAAGGAATTGACG
GGGGCCCGCACAAGCGGTGGAGCATGTGGTTTAATTCGAAGCAACGCGAA
GAACCTTACCAGGTCTTGACATCCTCTGACAACCCTAGAGATAGGGCTTT
CCCTTCGGGGACAGAGTGACAGGTGGTGCATGGTTGTCGTCAGCTCGTGT
CGTGAGATGTTGGGTTAAGTCCCGCAACGAGCGCAACCCTTGATCTTAGT
TGCCAGCATTTAGTTGGGCACTCTAAGGTGACTGCCGGTGACAAACCGGA
GGAAGGTGGGGATGACGTCAAATCATCATGCCCCTTATGACCTGGGCTAC
ACACGTGCTACAATGGACAGAACAAAGGGCTGCGAGACCGCAAGGTTTAG
CCAATCCCATAAATCTGTTCTCAGTTCGGATCGCAGTCTGCAACTCGACT
GCGTGAAGCTGGAATCGCTAGTAATCGCGGATCAGCATGCCGCGGTGAAT
ACGTTCCCGGGCCTTGTACACACCGCCCGTCACACCACGAGAGTTTGCAA
CACCCGAAGTCGGTGAGGTAACCTTTATGGAGCCAGCCGCCGAAGGTGGG
GCAGATGATTGGGGTGAAGTCGTAACAAGGTAGCCGTATCGGAAGGTGCG
GCTGGATCACCTCCTTT

[0115] The bacterial strain comprising a 16S rDNA sequence provided by SEQ ID NO: 5 (also referred to herein as “Strain 5”) has the highest homology with a bacterial strain of the species Pediococcus pentosaceus:

Strain 5 16S ribosomal RNA coding sequence
(16S rDNA)
(SEQ ID NO: 5)
ATGAGAGTTTGATCTTGGCTCAGGATGAACGCTGGCGGCGTGCCTAATAC
ATGCAAGTCGAACGAACTTCCGTTAATTGATTATGACGTACTTGTACTGA
TTGAGATTTTAACACGAAGTGAGTGGCGAACGGGTGAGTAACACGTGGGT
AACCTGCCCAGAAGTAGGGGATAACACCTGGAAACAGATGCTAATACCGT
ATAACAGAGAAAACCGCATGGTTTTCTTTTAAAAGATGGCTCTGCTATCA
CTTCTGGATGGACCCGCGGCGTATTAGCTAGTTGGTGAGGTAAAGGCTCA
CCAAGGCAGTGATACGTAGCCGACCTGAGAGGGTAATCGGCCACATTGGG
ACTGAGACACGGCCCAGACTCCTACGGGAGGCAGCAGTAGGGAATCTTCC
ACAATGGACGCAAGTCTGATGGAGCAACGCCGCGTGAGTGAAGAAGGGTT
TCGGCTCGTAAAGCTCTGTTGTTAAAGAAGAACGTGGGTAAGAGTAACTG
TTTACCCAGTGACGGTATTTAACCAGAAAGCCACGGCTAACTACGTGCCA
GCAGCCGCGGTAATACGTAGGTGGCAAGCGTTATCCGGATTTATTGGGCG
TAAAGCGAGCGCAGGCGGTCTTTTAAGTCTAATGTGAAAGCCTTCGGCTC
AACCGAAGAAGTGCATTGGAAACTGGGAGACTTGAGTGCAGAAGAGGACA
GTGGAACTCCATGTGTAGCGGTGAAATGCGTAGATATATGGAAGAACACC
AGTGGCGAAGGCGGCTGTCTGGTCTGCAACTGACGCTGAGGCTCGAAAGC
ATGGGTAGCGAACAGGATTAGATACCCTGGTAGTCCATGCCGTAAACGAT
GATTACTAAGTGTTGGAGGGTTTCCGCCCTTCAGTGCTGCAGCTAACGCA
TTAAGTAATCCGCCTGGGGAGTACGACCGCAAGGTTGAAACTCAAAAGAA
TTGACGGGGGCCCGCACAAGCGGTGGAGCATGTGGTTTAATTCGAAGCTA
CGCGAAGAACCTTACCAGGTCTTGACATCTTCTGACAGTCTAAGAGATTA
GAGGTTCCCTTCGGGGACAGAATGACAGGTGGTGCATGGTTGTCGTCAGC
TCGTGTCGTGAGATGTTGGGTTAAGTCCCGCAACGAGCGCAACCCTTATT
ACTAGTTGCCAGCATTAAGTTGGGCACTCTAGTGAGACTGCCGGTGACAA
ACCGGAGGAAGGTGGGGACGACGTCAAATCATCATGCCCCTTATGACCTG
GGCTACACACGTGCTACAATGGATGGTACAACGAGTCGCGAGACCGCGAG
GTTAAGCTAATCTCTTAAAACCATTCTCAGTTCGGACTGTAGGCTGCAAC
TCGCCTACACGAAGTCGGAATCGCTAGTAATCGCGGATCAGCATGCCGCG
GTGAATACGTTCCCGGGCCTTGTACACACCGCCCGTCACACCATGAGAGT
TTGTAACACCCAAAGCCGGTGGGGTAACCTTTTAGGAGCTAGCCGTCTAA
GGTGGGACAGATGATTAGGGTGAAGTCGTAACAAGGTAGCCGTAGGAGAA
CCTGCGGCTGGATCACCTCCTT

[0116] The bacterial strain comprising a 16S rDNA sequence provided by SEQ ID NO: 6 (also referred to herein as “Strain 6”) has the highest homology with a bacterial strain of the species Lactiplantibacillus plantarum:

Strain 6 16S ribosomal RNA coding sequence
(16S rDNA)
(SEQ ID NO: 6)
CTATCACTTTTGGATGGTCCCGCGGCGTATTAGCTAGATGGTGGGGTAAC
GGCTCACCATGGCAATGATACGTAGCCGACCTGAGAGGGTAATCGGCCAC
ATTGGGACTGAGACACGGCCCAAACTCCTACGGGAGGCAGCAGTAGGGAA
TCTTCCACAATGGACGAAAGTCTGATGGAGCAACGCCGCGTGAGTGAAGA
AGGGTTTCGGCTCGTAAAACTCTGTTGTTAAAGAAGAACATATCTGAGAG
TAACTGTTCAGGTATTGACGGTATTTAACCAGAAAGCCACGGCTAACTAC
GTGCCAGCAGCCGCGGTAATACGTAGGTGGCAAGCGTTGTCCGGATTTAT
TGGGCGTAAAGCGAGCGCAGGCGGTTTTTTAAGTCTGATGTGAAAGCCTT
CGGCTCAACCGAAGAAGTGCATCGGAAACTGGGAAACTTGAGTGCAGAAG
AGGACAGTGGAACTCCATGTGTAGCGGTGAAATGCGTAGATATATGGAAG
AACACCAGTGGCGAAGGCGGCTGTCTGGTCTGTAACTGACGCTGAGGCTC
GAAAGTATGGGTAGCAAACAGGATTAGATACCCTGGTAGTCCATACCGTA
AACGATGAATGCTAAGTGTTGGAGGGTTTCCGCCCTTCAGTGCTGCAGCT
AACGCATTAAGCATTCCGCCTGGGGAGTACGGCCGCAAGGCTGAAACTCA
AAGGAATTGACGGGGGCCCGCACAAGCGGTGGAGCATGTGGTTTAATTCG
AAGCTACGCGAAGAACCTTACCAGGTCTTGACATACTATGCAAATCTAAG
AGATTAGACGTTCCCTTCGGGGACATGGATACAGGTGGTGCATGGTTGTC
GTCAGCTCGTGTCGTGAGATGTTGGGTTAAGTCCCGCAACGAGCGCAACC
CTTATTATCAGTTGCCAGCATTAAGTTGGGCACTCTGGTGAGACTGCCGG
TGACAAACCGGAGGAAGGTGGGGATGACGTCAAATCATCATGCCCCTTAT
GACCTGGGCTACACACGTGCTACAATGGATGGTACAACGAGTTGCGAACT
CGCGAGAGTAAGCTAATCTCTTAAAGCCATTCTCAGTTCGGATTGTAGGC
TGCAACTCGCCTACATGAAGTCGGAATCGCTAGTAATCGCGGATCAGCAT
GCCGCGGTGAATACGTTCCCGGGCCTTGTACACACCGCCCGTCACACCAT
GAGAGTTTGTAACACCCAAAGTCGGTGGGGTAACCTTTTAGGAACCAGCC
GCCTAAGGTGGGACAGATGATTAGGGTGAAGTCGTAACAAGGTAGCCGTA
GGAGAACCTGCGGCTGGATCACCTCCTT

[0117] The bacterial strain comprising a 16S rDNA sequence provided by SEQ ID NO: 7 (also referred to herein as “Strain 7”) has the highest homology with a bacterial strain of the species Lactobacillus delbrueckii:

Strain 7 16S ribosomal RNA coding sequence
(16S rDNA)
(SEQ ID NO: 7)
AGAGTTTGATCCTGGCTCAGGACGAACGCTGGCGGCGTGCCTAATACATG
CAAGTCGAGCGAGCTGAATTCAAAGATCCCTTCGGGGTGATTTGTTGGAC
GCTAGCGGCGGATGGGTGAGTAACACGTGGGCAATCTGCCCTAAAGACTG
GGATACCACTTGGAAACAGGTGCTAATACCGGATAACAACATGAATCGCA
TGATTCAAGTTTGAAAGGCGGCGCAAGCTGTCACTTTAGGATGAGCCCGC
GGCGCATTAGCTAGTTGGTGGGGTAAAGGCCTACCAAGGCAATGATGCGT
AGCCGAGTTGAGAGACTGATCGGCCACATTGGGACTGAGACACGGCCCAA
ACTCCTACGGGAGGCAGCAGTAGGGAATCTTCCACAATGGACGCAAGTCT
GATGGAGCAACGCCGCGTGAGTGAAGAAGGTCTTCGGATCGTAAAGCTCT
GTTGTTGGTGAAGAAGGATAGAGGCAGTAACTGGTCTTTATTTGACGGTA
ATCAACCAGAAAGTCACGGCTAACTACGTGCCAGCAGCCGCGGTAATACG
TAGGTGGCAAGCGTTGTCCGGATTTATTGGGCGTAAAGCGAGCGCAGGCG
GAATGATAAGTCTGATGTGAAAGCCCACGGCTCAACCGTGGAACTGCATC
GGAAACTGTCATTCTTGAGTGCAGAAGAGGAGAGTGGAACTCCATGTGTA
GCGGTGGAATGCGTAGATATATGGAAGAACACCAGTGGCGAAGGCGGCTC
TCTGGTCTGCAACTGACGCTGAGGCTCGAAAGCATGGGTAGCGAACAGGA
TTAGATACCCTGGTAGTCCATGCCGTAAACGATGAGCGCTAGGTGTTGGG
GACTTTCCNGTCCTCAGTGCCGCAGCAAACGCATTAAGCGCTCCGCCTGG
GGAGTACGACCGCAAGGTTGAAACTCAAAGGAATTGACGGGGGCCCGCAC
AAGCGGTGGAGCATGTGGTTTAATTCGAAGCAACGCGAAGAACCTTACCA
GGTCTTGACATCCTGCGCTACACCTAGAGATAGGTGGTTCCCTTCGGGGA
CGCAGAGACAGGTGGTGCATGGCTGTCGTCAGCTCGTGTCGTGAGATGTT
GGGTTAAGTCCCGCAACGAGCGCAACCCTTGTCTTTAGITGCCATCATTA
AGTTGGGCACTCTAAAGAGACTGCCGGTGACAAACCGGAGGAAGGTGGGG
ATGACGTCAAGTCATCATGCCCCTTATGACCTGGGCTACACACGTGCTAC
AATGGGCAGTACAACGAGAAGCNAACCCGCGAGGGTAAGCGGATCTCTTA
AAGCTGTTCTCAGTTCGGACTGCAGGCTGCAACTCGCCTGCACGAAGCTG
GAATCGCTAGTAATCGCGGATCAGCACGCCGCGGTGAATACGTTCCCGGG
CCTTGTACACACCGCCCGTCACACCATGGAAGTCTGCAATGCCCAAAGTC
GGTGAGATAACCTTTATAGGAGTCAGCCGCCTAAGGCAGGGCAGATGACT
GGGGTGAAGTCGTAACAAGGTAACC

[0118] The bacterial strain comprising a 16S rDNA sequence provided by SEQ ID NO: 8 (also referred to herein as “Strain 8”) has the highest homology with a bacterial strain of the species Limosilactobacillus fermentum:

Strain 8 16S ribosomal RNA coding sequence
(16S rDNA)
(SEQ ID NO: 8)
CGGCGGTGTGCCTAATACATGCAAGTCGAACGCGTTGGCCCAATTGATTG
ATGGTGCTTGCACCTGATTGATTTTGGTCGCCAACGAGTGGCGGACGGGT
GAGTAACACGTAGGTAACCTGCCCAGAAGCGGGGGACAACATTTGGAAAC
AGATGCTAATACCGCATAACAACGTTGTTCGCATGAACAACGCTTAAAAG
ATGGCTTCTCGCTATCACTTCTGGATGGACCTGCGGTGCATTAGCTTGTT
GGTGGGGTAACGGCCTACCAAGGCGATGATGCATAGCCGAGTTGAGAGAC
TGATCGGCCACAATGGGACTGAGACACGGCCCATACTCCTACGGGAGGCA
GCAGTAGGGAATCTTCCACAATGGGCGCAAGCCTGATGGAGCAACACCGC
GTGAGTGAAGAAGGGTTTCGGCTCGTAAAGCTCTGTTGTTAAAGAAGAAC
ACGTATGAGAGTAACTGTTCATACGTTGACGGTATTTAACCAGAAAGTCA
CGGCTAACTACGTGCCAGCAGCCGCGGTAATACGTAGGTGGCAAGCGTTA
TCCGGATTTATTGGGCGTAAAGAGAGTGCAGGCGGTTTTCTAAGTCTGAT
GTGAAAGCCTTCGGCTTAACCGGAGAAGTGCATCGGAAACTGGATAACTT
GAGTGCAGAAGAGGGTAGTGGAACTCCATGTGTAGCGGTGGAATGCGTAG
ATATATGGAAGAACACCAGTGGCGAAGGCGGCTACCTGGTCTGCAACTGA
CGCTGAGACTCGAAAGCATGGGTAGCGAACAGGATTAGATACCCTGGTAG
TCCATGCCGTAAACGATGAGTGCTAGGTGTTGGAGGGTTTCCGCCCTTCA
GTGCCGGAGCTAACGCATTAAGCACTCCGCCTGGGGAGTACGACCGCAAG
GTTGAAACTCAAAGGAATTGACGGGGGCCCGCACAAGCGGTGGAGCATGT
GGTTTAATTCGAAGCTACGCGAAGAACCTTACCAGGTCTTGACATCTTGC
GCCAACCCTAGAGATAGGGCGTTTCCTTCGGGAACGCAATGACAGGTGGT
GCATGGTCGTCGTCAGCTCGTGTCGTGAGATGTTGGGTTAAGTCCCGCAA
CGAGCGCAACCCTTGTTACTAGTTGCCAGCATTAAGTTGGGCACTCTAGT
GAGACTGCCGGTGACAAACCGGAGGAAGGTGGGGACGACGTCAGATCATC
ATGCCCCTTATGACCTGGGCTACACACGTGCTACAATGGACGGTACAACG
AGTCGCGAACTCGCGAGGGCAAGCAAATCTCTTAAAACCGTTCTCAGTTC
GGACTGCAGGCTGCAACTCGCCTGCACGAAGTCGGAATCGCTAGTAATCG
CGGATCAGCATGCCGCGGTGAATACGTTCCCGGGCCTTGTACACACCGCC
CGTCACACCATGAGAGTTTGTAACACCCAAAGTCGGTGGGGTAACCTTTT
AGGAGCCAGCCGCCTAAGGTGGGACAGATGATTAGGGTGAAGTCGTAACA
AG

[0119] The bacterial strain comprising a 16S rDNA sequence provided by SEQ ID NO: 9 (also referred to herein as “Strain 9”) has the highest homology with a bacterial strain of the species Bacillus subtilis:

Strain 9 16S ribosomal RNA coding sequence
(16S rDNA)
(SEQ ID NO: 9)
GTTAGCGGCGGACGGGTGAGTAACACGTGGGTAACCTGCCTGTAAGACTG
GGATAACTCCGGGAAACCGGGGCTAATACCGGATGGTTGTTTGAACCGCA
TGGTTCAAACATAAAAGGTGGCTTCGGCTACCACTTACAGATGGACCCGC
GGCGCATTAGCTAGTTGGTGAGGTAACGGCTCACCAAGGCGACGATGCGT
AGCCGACCTGAGAGGGTGATCGGCCACACTGGGACTGAGACACGGCCCAG
ACTCCTACGGGAGGCAGCAGTAGGGAATCTTCCGCAATGGACGAAAGTCT
GACGGAGCAACGCCGCGTGAGTGATGAAGGTTTTCGGATCGTAAAGCTCT
GTTGTTAGGGAAGAACAAGTACCGTTCGAATAGGGCGGTACCTTGACGGT
ACCTAACCAGAAAGCCACGGCTAACTACGTGCCAGCAGCCGCGGTAATAC
GTAGGTGGCAAGCGTTGTCCGGAATTATTGGGCGTAAAGGGCTCGCAGGC
GGTTTCTTAAGTCTGATGTGAAAGCCCCCGGCTCAACCGGGGAGGGTCAT
TGGAAACTGGGGAACTTGAGTGCAGAAGAGGAGAGTGGAATTCCACGTGT
AGCGGTGAAATGCGTAGAGATGTGGAGGAACACCAGTGGCGAAGGCGACT
CTCTGGTCTGTAACTGACGCTGAGGAGCGAAAGCGTGGGGAGCGAACAGG
ATTAGATACCCTGGTAGTCCACGCCGTAAACGATGAGTGCTAAGTGTTAG
GGGGTTTCCGCCCCTTAGTGCTGCAGCTAACGCATTAAGCACTCCGCCTG
GGGAGTACGGTCGCAAGACTGAAACTCAAAGGAATTGACGGGGGCCCGCA
CAAGCGGTGGAGCATGTGGTTTAATTCGAAGCAACGCGAAGAACCTTACC
AGGTCTTGACATCCTCTGACAATCCTAGAGATAGGACGTCCCCTTCGGGG
GCAGAGTGACAGGTGGTGCATGGTTGTCGTCAGCTCGTGTCGTGAGATGT
TGGGTTAAGTCCCGCAACGAGCGCAACCCTTGATCTTAGTTGCCAGCATT
CAGTTGGGCACTCTAAGGTGACTGCCGGTGACAAACCGGAGGAAGGTGGG
GATGACGTCAAATCATCATGCCCCTTATGACCTGGGCTACACACGTGCTA
CAATGGACAGAACAAAGGGCAGCGAAACCGCGAGGTTAAGCCAATCCCAC
AAATCTGTTCTCAGTTCGGATCGCAGTCTGCAACTCGACTGCGTGAAGCT
GGAATCGCTAGTAATCGCGGATCAGCATGCCGCGGTGAATACGTTCCCGG
GCCTTGTACACACCGCCCGTCACACCACGAGAGTTTGTAACACCCGAAGT
CGGTGAGGTAACCTTTTAGGAGCCAGCCGCCGAAGGTGGGACAGATGATT
GGGGTGAAGTCGTAACAAGGTAGCCGTATCGGAAGGTGCGGCTGGATCAC
CTCCTTT

[0120] In some embodiments, a composition comprises fermentates of two or more bacterial strains belonging to the species Bacillus subtilis, wherein the bacterial strains belonging to the species Bacillus subtilis are different bacterial strains. In some embodiments, the bacterial mixture comprises one bacterial strain belonging to Bacillus subtilis. In some embodiments, the bacterial mixture comprises two bacterial strains belonging to Bacillus subtilis. In some embodiments, the bacterial mixture comprises 2, 3, 4, 5, 6, 7, 8, 9, or 10 bacterial strains belonging to Bacillus subtilis. In some embodiments, a first bacterial strain belonging to Bacillus subtilis comprises a 16S rDNA sequence with at least 97% sequence identity to the nucleic acid sequence of SEQ ID NO: 1, and a second bacterial strain belonging to Bacillus subtilis comprises a 16S rDNA sequence with at least 97% sequence identity to the nucleic acid sequence of SEQ ID NO: 9, and the 16S rDNA sequences of the first and second bacterial strains belonging to Bacillus subtilis are not 100% identical. In some embodiments, the 16S rDNA sequence of the first bacterial strain belonging to Bacillus subtilis has no more than 99.9%, 99.8%, 99.7%, 99.6%, 99.5%, 99.4%, 99.3%, 99.2%, 99.1%, 99.0%, 98.8%, 98.6%, 98.5%, 98.4%, 98.2%, 98.0%, 97.8%, 97.6%, 97.5%, 97.4%, or 97.2% identity to 16S rDNA sequence of the second bacterial strain belonging to Bacillus subtilis.

[0121] In some embodiments, a composition comprises fermentates of two or more bacterial strains belonging to the species Bacillus amyloliquefaciens, wherein the bacterial strains belonging to the species Bacillus amyloliquefaciens are different bacterial strains. In some embodiments, the bacterial mixture comprises one bacterial strain belonging to Bacillus amyloliquefaciens. In some embodiments, the bacterial mixture comprises two bacterial strains belonging to Bacillus amyloliquefaciens. In some embodiments, the bacterial mixture comprises 2, 3, 4, 5, 6, 7, 8, 9, or 10 bacterial strains belonging to Bacillus amyloliquefaciens. In some embodiments, the 16S rDNA sequence of the first bacterial strain belonging to Bacillus amyloliquefaciens has no more than 99.9%, 99.8%, 99.7%, 99.6%, 99.5%, 99.4%, 99.3%, 99.2%, 99.1%, 99.0%, 98.8%, 98.6%, 98.5%, 98.4%, 98.2%, 98.0%, 97.8%, 97.6%, 97.5%, 97.4%, or 97.2% identity to 16S rDNA sequence of the second bacterial strain belonging to Bacillus amyloliquefaciens.

[0122] In some embodiments, a composition comprises fermentates of two or more bacterial strains belonging to the species Bacillus licheniformis, wherein the bacterial strains belonging to the species Bacillus licheniformis are different bacterial strains. In some embodiments, the bacterial mixture comprises a fermentate from one bacterial strain belonging to Bacillus licheniformis. In some embodiments, the bacterial mixture comprises fermentates from two bacterial strains belonging to Bacillus licheniformis. In some embodiments, the composition comprises fermentates from 2, 3, 4, 5, 6, 7, 8, 9, or 10 bacterial strains belonging to Bacillus licheniformis. In some embodiments, the 16S rDNA sequence of the first bacterial strain belonging to Bacillus licheniformis has no more than 99.9%, 99.8%, 99.7%, 99.6%, 99.5%, 99.4%, 99.3%, 99.2%, 99.1%, 99.0%, 98.8%, 98.6%, 98.5%, 98.4%, 98.2%, 98.0%, 97.8%, 97.6%, 97.5%, 97.4%, or 97.2% identity to 16S rDNA sequence of the second bacterial strain belonging to Bacillus licheniformis.

[0123] In some embodiments, a composition comprises fermentates of two or more bacterial strains belonging to the species Bacillus pumilus, wherein the bacterial strains belonging to the species Bacillus pumilus are different bacterial strains. In some embodiments, the composition comprises a fermentate from one bacterial strain belonging to Bacillus pumilus. In some embodiments, the bacterial mixture comprises fermentates from two bacterial strains belonging to Bacillus pumilus. In some embodiments, the composition comprises fermentates from 2, 3, 4, 5, 6, 7, 8, 9, or 10 bacterial strains belonging to Bacillus pumilus. In some embodiments, the 16S rDNA sequence of the first bacterial strain belonging to Bacillus pumilus has no more than 99.9%, 99.8%, 99.7%, 99.6%, 99.5%, 99.4%, 99.3%, 99.2%, 99.1%, 99.0%, 98.8%, 98.6%, 98.5%, 98.4%, 98.2%, 98.0%, 97.8%, 97.6%, 97.5%, 97.4%, or 97.2% identity to 16S rDNA sequence of the second bacterial strain belonging to Bacillus pumilus.

[0124] In some embodiments, a composition comprises fermentates of two or more bacterial strains belonging to the species Pediococcus pentosaceus, wherein the bacterial strains belonging to the species Pediococcus pentosaceus are different bacterial strains. In some embodiments, the composition comprises a fermentate from one bacterial strain belonging to Pediococcus pentosaceus. In some embodiments, the composition comprises fermentates from two bacterial strains belonging to Pediococcus pentosaceus. In some embodiments, the composition comprises fermentates from 2, 3, 4, 5, 6, 7, 8, 9, or 10 bacterial strains belonging to Pediococcus pentosaceus. In some embodiments, the 16S rDNA sequence of the first bacterial strain belonging to Pediococcus pentosaceus has no more than 99.9%, 99.8%, 99.7%, 99.6%, 99.5%, 99.4%, 99.3%, 99.2%, 99.1%, 99.0%, 98.8%, 98.6%, 98.5%, 98.4%, 98.2%, 98.0%, 97.8%, 97.6%, 97.5%, 97.4%, or 97.2% identity to 16S rDNA sequence of the second bacterial strain belonging to Pediococcus pentosaceus.

[0125] In some embodiments, a composition comprises fermentates of two or more bacterial strains belonging to the species Lactiplantibacillus plantarum, wherein the bacterial strains belonging to the species Lactiplantibacillus plantarum are different bacterial strains. In some embodiments, the composition comprises a fermentate from one bacterial strain belonging to Lactiplantibacillus plantarum. In some embodiments, the composition comprises fermentates from two bacterial strains belonging to Lactiplantibacillus plantarum. In some embodiments, the composition comprises fermentates from 2, 3, 4, 5, 6, 7, 8, 9, or 10 bacterial strains belonging to Lactiplantibacillus plantarum. In some embodiments, the 16S rDNA sequence of the first bacterial strain belonging to Lactiplantibacillus plantarum has no more than 99.9%, 99.8%, 99.7%, 99.6%, 99.5%, 99.4%, 99.3%, 99.2%, 99.1%, 99.0%, 98.8%, 98.6%, 98.5%, 98.4%, 98.2%, 98.0%, 97.8%, 97.6%, 97.5%, 97.4%, or 97.2% identity to 16S rDNA sequence of the second bacterial strain belonging to Lactiplantibacillus plantarum.

[0126] In some embodiments, a composition comprises fermentates of two or more bacterial strains belonging to the species Lactobacillus delbrueckii, wherein the bacterial strains belonging to the species Lactobacillus delbrueckii are different bacterial strains. In some embodiments, the composition comprises a fermentate from one bacterial strain belonging to Lactobacillus delbrueckii. In some embodiments, the composition comprises fermentates from two bacterial strains belonging to Lactobacillus delbrueckii. In some embodiments, the composition comprises fermentates from 2, 3, 4, 5, 6, 7, 8, 9, or 10 bacterial strains belonging to Lactobacillus delbrueckii. In some embodiments, the 16S rDNA sequence of the first bacterial strain belonging to Lactobacillus delbrueckii has no more than 99.9%, 99.8%, 99.7%, 99.6%, 99.5%, 99.4%, 99.3%, 99.2%, 99.1%, 99.0%, 98.8%, 98.6%, 98.5%, 98.4%, 98.2%, 98.0%, 97.8%, 97.6%, 97.5%, 97.4%, or 97.2% identity to 16S rDNA sequence of the second bacterial strain belonging to Lactobacillus delbrueckii.

[0127] In some embodiments, a composition comprises fermentates of two or more bacterial strains belonging to the species Limosilactobacillus fermentum, wherein the bacterial strains belonging to the species Limosilactobacillus fermentum are different bacterial strains. In some embodiments, the composition comprises a fermentate from one bacterial strain belonging to Limosilactobacillus fermentum. In some embodiments, the composition comprises fermentates from two bacterial strains belonging to Limosilactobacillus fermentum. In some embodiments, the composition comprises fermentates from 2, 3, 4, 5, 6, 7, 8, 9, or 10 bacterial strains belonging to Limosilactobacillus fermentum. In some embodiments, the 16S rDNA sequence of the first bacterial strain belonging to Limosilactobacillus fermentum has no more than 99.9%, 99.8%, 99.7%, 99.6%, 99.5%, 99.4%, 99.3%, 99.2%, 99.1%, 99.0%, 98.8%, 98.6%, 98.5%, 98.4%, 98.2%, 98.0%, 97.8%, 97.6%, 97.5%, 97.4%, or 97.2% identity to 16S rDNA sequence of the second bacterial strain belonging to Limosilactobacillus fermentum.

[0128] In some embodiments, a composition comprises a fermentate of one or more additional bacterial strains. Additional bacterial strains that produce fermentates may be taxonomically or phylogenetically related to bacterial strains of Bacillus subtilis, Bacillus amyloliquefaciens, Bacillus licheniformis, Bacillus pumilus, Pediococcus pentosaceus, Lactiplantibacillus plantarum, Lactobacillus delbrueckii, and Limosilactobacillus fermentum. In some embodiments, one or more additional bacterial strains belong to the species Bacillus subtilis. In some embodiments, one or more additional bacterial strains belong to the species Bacillus amyloliquefaciens. In some embodiments, one or more additional bacterial strains belong to the species Bacillus licheniformis. In some embodiments, one or more additional bacterial strains belong to the species Bacillus pumilus. In some embodiments, one or more additional bacterial strains belong to the species Pediococcus pentosaceus. In some embodiments, one or more additional bacterial strains belong to the species Lactiplantibacillus plantarum. In some embodiments, one or more additional bacterial strains belong to the species Lactobacillus delbrueckii. In some embodiments, one or more additional bacterial strains belong to the species Limosilactobacillus fermentum.

[0129] In some embodiments, a composition comprises fermentates of 2, 3, 4, 5, 6, 7, 8, 9, 10, 11, 12, 13, 14, 15, 16, 17, 18, 19, or 20 additional bacterial strains belonging to the species Bacillus subtilis. In some embodiments, the 16S rDNA sequence of an additional bacterial strain belonging to Bacillus subtilis is not identical to SEQ ID NO: 1 or SEQ ID NO: 9. In some embodiments, an additional bacterial strain belonging to Bacillus subtilis comprises a 16S rDNA sequence that has at least 97%, but less than 100%, sequence identity to the nucleic acid sequence of SEQ ID NO: 1, and less than 100% sequence identity to the nucleic acid sequence of SEQ ID NO: 9. In some embodiments, each additional bacterial strain belonging to the species Bacillus subtilis comprises a genome with at least 95.0%, 95.1%, 95.2%, 95.3%, 95.4%, 95.5%, 95.6%, 95.7%, 95.8%, 95.9%, 96.0%, 96.1%, 96.2%, 96.3%, 96.4%, 96.5%, 96.6%, 96.7%, 96.8%, 96.9%, 97.0%, 97.1%, 97.2%, 97.3%, 97.4%, 97.5%, 97.6%, 97.7%, 97.8%, 97.9%, 98.0%, 98.1%, 98.2%, 98.3%, 98.4%, 98.5%, 98.6%, 98.7%, 98.8%, 98.9%, 99.0%, 99.1%, 99.2%, 99.3%, 99.4%, 99.5%, 99.6%, 99.7%, 99.8%, or 99.9% ANI to the reference genome of SEQ ID NO: 10 or 18. In some embodiments, each additional bacterial strain belonging to the species Bacillus subtilis comprises a genome with an AF of at least 20%, 25%, 30%, 35%, 40%, 45%, 50%, 55%, 60%, 65%, 70%, 75%, 80%, 85%, 90%, 91%, 92%, 93%, 94%, 95%, 96%, 97%, 98%, or 99% to the reference genome of SEQ ID NO: 10 or 18.

[0130] In some embodiments, a composition comprises fermentates of 2, 3, 4, 5, 6, 7, 8, 9, 10, 11, 12, 13, 14, 15, 16, 17, 18, 19, or 20 additional bacterial strains belonging to the species Bacillus amyloliquefaciens. In some embodiments, the 16S rDNA sequence of an additional bacterial strain belonging to Bacillus amyloliquefaciens is not identical to SEQ ID NO: 2. In some embodiments, an additional bacterial strain belonging to Bacillus amyloliquefaciens comprises a 16S rDNA sequence that has at least 97%, but less than 100%, sequence identity to the nucleic acid sequence of SEQ ID NO: 2. In some embodiments, each additional bacterial strain belonging to the species Bacillus amyloliquefaciens comprises a genome with at least 95.0%, 95.1%, 95.2%, 95.3%, 95.4%, 95.5%, 95.6%, 95.7%, 95.8%, 95.9%, 96.0%, 96.1%, 96.2%, 96.3%, 96.4%, 96.5%, 96.6%, 96.7%, 96.8%, 96.9%, 97.0%, 97.1%, 97.2%, 97.3%, 97.4%, 97.5%, 97.6%, 97.7%, 97.8%, 97.9%, 98.0%, 98.1%, 98.2%, 98.3%, 98.4%, 98.5%, 98.6%, 98.7%, 98.8%, 98.9%, 99.0%, 99.1%, 99.2%, 99.3%, 99.4%, 99.5%, 99.6%, 99.7%, 99.8%, or 99.9% ANI to the reference genome of SEQ ID NO: 11. In some embodiments, each additional bacterial strain belonging to the species Bacillus amyloliquefaciens comprises a genome with an AF of at least 20%, 25%, 30%, 35%, 40%, 45%, 50%, 55%, 60%, 65%, 70%, 75%, 80%, 85%, 90%, 91%, 92%, 93%, 94%, 95%, 96%, 97%, 98%, or 99% to the reference genome of SEQ ID NO: 11.

[0131] In some embodiments, a composition comprises fermentates of 2, 3, 4, 5, 6, 7, 8, 9, 10, 11, 12, 13, 14, 15, 16, 17, 18, 19, or 20 additional bacterial strains belonging to the species Bacillus licheniformis. In some embodiments, the 16S rDNA sequence of an additional bacterial strain belonging to Bacillus licheniformis is not identical to SEQ ID NO: 3. In some embodiments, an additional bacterial strain belonging to Bacillus licheniformis comprises a 16S rDNA sequence that has at least 97%, but less than 100%, sequence identity to the nucleic acid sequence of SEQ ID NO: 3. In some embodiments, each additional bacterial strain belonging to the species Bacillus licheniformis comprises a genome with at least 95.0%, 95.1%, 95.2%, 95.3%, 95.4%, 95.5%, 95.6%, 95.7%, 95.8%, 95.9%, 96.0%, 96.1%, 96.2%, 96.3%, 96.4%, 96.5%, 96.6%, 96.7%, 96.8%, 96.9%, 97.0%, 97.1%, 97.2%, 97.3%, 97.4%, 97.5%, 97.6%, 97.7%, 97.8%, 97.9%, 98.0%, 98.1%, 98.2%, 98.3%, 98.4%, 98.5%, 98.6%, 98.7%, 98.8%, 98.9%, 99.0%, 99.1%, 99.2%, 99.3%, 99.4%, 99.5%, 99.6%, 99.7%, 99.8%, or 99.9% ANI to the reference genome of SEQ ID NO: 12. In some embodiments, each additional bacterial strain belonging to the species Bacillus licheniformis comprises a genome with an AF of at least 20%, 25%, 30%, 35%, 40%, 45%, 50%, 55%, 60%, 65%, 70%, 75%, 80%, 85%, 90%, 91%, 92%, 93%, 94%, 95%, 96%, 97%, 98%, or 99% to the reference genome of SEQ ID NO: 12.

[0132] In some embodiments, a composition comprises fermentates of 2, 3, 4, 5, 6, 7, 8, 9, 10, 11, 12, 13, 14, 15, 16, 17, 18, 19, or 20 additional bacterial strains belonging to the species Bacillus pumilus. In some embodiments, the 16S rDNA sequence of an additional bacterial strain belonging to Bacillus pumilus is not identical to SEQ ID NO: 4. In some embodiments, an additional bacterial strain belonging to Bacillus pumilus comprises a 16S rDNA sequence that has at least 97%, but less than 100%, sequence identity to the nucleic acid sequence of SEQ ID NO: 4. In some embodiments, each additional bacterial strain belonging to the species Bacillus pumilus comprises a genome with at least 95.0%, 95.1%, 95.2%, 95.3%, 95.4%, 95.5%, 95.6%, 95.7%, 95.8%, 95.9%, 96.0%, 96.1%, 96.2%, 96.3%, 96.4%, 96.5%, 96.6%, 96.7%, 96.8%, 96.9%, 97.0%, 97.1%, 97.2%, 97.3%, 97.4%, 97.5%, 97.6%, 97.7%, 97.8%, 97.9%, 98.0%, 98.1%, 98.2%, 98.3%, 98.4%, 98.5%, 98.6%, 98.7%, 98.8%, 98.9%, 99.0%, 99.1%, 99.2%, 99.3%, 99.4%, 99.5%, 99.6%, 99.7%, 99.8%, or 99.9% ANI to the reference genome of SEQ ID NO: 13. In some embodiments, each additional bacterial strain belonging to the species Bacillus pumilus comprises a genome with an AF of at least 20%, 25%, 30%, 35%, 40%, 45%, 50%, 55%, 60%, 65%, 70%, 75%, 80%, 85%, 90%, 91%, 92%, 93%, 94%, 95%, 96%, 97%, 98%, or 99% to the reference genome of SEQ ID NO: 13.

[0133] In some embodiments, a composition comprises fermentates of 2, 3, 4, 5, 6, 7, 8, 9, 10, 11, 12, 13, 14, 15, 16, 17, 18, 19, or 20 additional bacterial strains belonging to the species Pediococcus pentosaceus. In some embodiments, the 16S rDNA sequence of an additional bacterial strain belonging to Pediococcus pentosaceus is not identical to SEQ ID NO: 5. In some embodiments, an additional bacterial strain belonging to Pediococcus pentosaceus comprises a 16S rDNA sequence that has at least 97%, but less than 100%, sequence identity to the nucleic acid sequence of SEQ ID NO: 5. In some embodiments, each additional bacterial strain belonging to the species Pediococcus pentosaceus comprises a genome with at least 95.0%, 95.1%, 95.2%, 95.3%, 95.4%, 95.5%, 95.6%, 95.7%, 95.8%, 95.9%, 96.0%, 96.1%, 96.2%, 96.3%, 96.4%, 96.5%, 96.6%, 96.7%, 96.8%, 96.9%, 97.0%, 97.1%, 97.2%, 97.3%, 97.4%, 97.5%, 97.6%, 97.7%, 97.8%, 97.9%, 98.0%, 98.1%, 98.2%, 98.3%, 98.4%, 98.5%, 98.6%, 98.7%, 98.8%, 98.9%, 99.0%, 99.1%, 99.2%, 99.3%, 99.4%, 99.5%, 99.6%, 99.7%, 99.8%, or 99.9% ANI to the reference genome of SEQ ID NO: 14. In some embodiments, each additional bacterial strain belonging to the species Pediococcus pentosaceus comprises a genome with an AF of at least 20%, 25%, 30%, 35%, 40%, 45%, 50%, 55%, 60%, 65%, 70%, 75%, 80%, 85%, 90%, 91%, 92%, 93%, 94%, 95%, 96%, 97%, 98%, or 99% to the reference genome of SEQ ID NO: 14.

[0134] In some embodiments, a composition comprises fermentates of 2, 3, 4, 5, 6, 7, 8, 9, 10, 11, 12, 13, 14, 15, 16, 17, 18, 19, or 20 additional bacterial strains belonging to the species Lactiplantibacillus plantarum. In some embodiments, the 16S rDNA sequence of an additional bacterial strain belonging to Lactiplantibacillus plantarum is not identical to SEQ ID NO: 6. In some embodiments, an additional bacterial strain belonging to Lactiplantibacillus plantarum comprises a 16S rDNA sequence that has at least 97%, but less than 100%, sequence identity to the nucleic acid sequence of SEQ ID NO: 6. In some embodiments, each additional bacterial strain belonging to the species Lactiplantibacillus plantarum comprises a genome with at least 95.0%, 95.1%, 95.2%, 95.3%, 95.4%, 95.5%, 95.6%, 95.7%, 95.8%, 95.9%, 96.0%, 96.1%, 96.2%, 96.3%, 96.4%, 96.5%, 96.6%, 96.7%, 96.8%, 96.9%, 97.0%, 97.1%, 97.2%, 97.3%, 97.4%, 97.5%, 97.6%, 97.7%, 97.8%, 97.9%, 98.0%, 98.1%, 98.2%, 98.3%, 98.4%, 98.5%, 98.6%, 98.7%, 98.8%, 98.9%, 99.0%, 99.1%, 99.2%, 99.3%, 99.4%, 99.5%, 99.6%, 99.7%, 99.8%, or 99.9% ANI to the reference genome of SEQ ID NO: 15. In some embodiments, each additional bacterial strain belonging to the species Lactiplantibacillus plantarum comprises a genome with an AF of at least 20%, 25%, 30%, 35%, 40%, 45%, 50%, 55%, 60%, 65%, 70%, 75%, 80%, 85%, 90%, 91%, 92%, 93%, 94%, 95%, 96%, 97%, 98%, or 99% to the reference genome of SEQ ID NO: 15.

[0135] In some embodiments, a composition comprises fermentates of 2, 3, 4, 5, 6, 7, 8, 9, 10, 11, 12, 13, 14, 15, 16, 17, 18, 19, or 20 additional bacterial strains belonging to the species Lactobacillus delbrueckii. In some embodiments, the 16S rDNA sequence of an additional bacterial strain belonging to Lactobacillus delbrueckii is not identical to SEQ ID NO: 7. In some embodiments, an additional bacterial strain belonging to Lactobacillus delbrueckii comprises a 16S rDNA sequence that has at least 97%, but less than 100%, sequence identity to the nucleic acid sequence of SEQ ID NO: 7.

[0136] In some embodiments, a composition comprises fermentates of 2, 3, 4, 5, 6, 7, 8, 9, 10, 11, 12, 13, 14, 15, 16, 17, 18, 19, or 20 additional bacterial strains belonging to the species Limosilactobacillus fermentum. In some embodiments, the 16S rDNA sequence of an additional bacterial strain belonging to Limosilactobacillus fermentum is not identical to SEQ ID NO: 8. In some embodiments, an additional bacterial strain belonging to Limosilactobacillus fermentum comprises a 16S rDNA sequence that has at least 97%, but less than 100%, sequence identity to the nucleic acid sequence of SEQ ID NO: 8. In some embodiments, each additional bacterial strain belonging to the species Limosilactobacillus fermentum comprises a genome with at least 95.0%, 95.1%, 95.2%, 95.3%, 95.4%, 95.5%, 95.6%, 95.7%, 95.8%, 95.9%, 96.0%, 96.1%, 96.2%, 96.3%, 96.4%, 96.5%, 96.6%, 96.7%, 96.8%, 96.9%, 97.0%, 97.1%, 97.2%, 97.3%, 97.4%, 97.5%, 97.6%, 97.7%, 97.8%, 97.9%, 98.0%, 98.1%, 98.2%, 98.3%, 98.4%, 98.5%, 98.6%, 98.7%, 98.8%, 98.9%, 99.0%, 99.1%, 99.2%, 99.3%, 99.4%, 99.5%, 99.6%, 99.7%, 99.8%, or 99.9% ANI to the reference genome of SEQ ID NO: 17. In some embodiments, each additional bacterial strain belonging to the species Limosilactobacillus fermentum comprises a genome with an AF of at least 20%, 25%, 30%, 35%, 40%, 45%, 50%, 55%, 60%, 65%, 70%, 75%, 80%, 85%, 90%, 91%, 92%, 93%, 94%, 95%, 96%, 97%, 98%, or 99% to the reference genome of SEQ ID NO: 17.

[0137] Some embodiments of the compositions described herein comprise fermentates of two or more bacterial strains. In some embodiments, the composition comprises fermentates of at least 2, at least 3 at least 4, at least 5, at least 6, at least 7, at least 8, at least 9, at least 10, at least 11, at least 12, at least 13, at least 14, at least 15, at least 16, at least 17, at least 18, at least 19, or up to 20 total bacterial strains. In some embodiments, the composition comprises fermentates of 2-20, 2-19, 2-18, 2-17, 2-16, 2-15, 2-14, 2-13, 2-12, 2-11, 2-10, 2-9, 2-8, 2-7, 2-6, 2-5, 2-4, 2-3, 3-20, 3-19, 3-18, 3-17, 3-16, 3-15, 3-14, 3-13, 3-12, 3-11, 3-10, 3-9, 3-8, 3-7, 3-6, 3-5, 3-4, 4-20, 4-19, 4-18, 4-17, 4-16, 4-15, 4-14, 4-13, 4-12, 4-11, 4-10, 4-9, 4-8, 4-7, 4-6, 4-5, 5-20, 5-19, 5-18, 5-17, 5-16, 5-15, 5-14, 5-13, 5-12, 5-11, 5-10, 5-9, 5-8, 5-7, 5-6, 6-20, 6-19, 6-18, 6-17, 6-16, 6-15, 6-14, 6-13, 6-12, 6-11, 6-10, 6-9, 6-8, 6-7, 7-20, 7-19, 7-18, 7-17, 7-16, 7-15, 7-14, 7-13, 7-12, 7-11, 7-10, 7-9, 7-8, 8-20, 8-19, 8-18, 8-17, 8-16, 8-15, 8-14, 8-13, 8-12, 8-11, 8-10, 8-9, 9-20, 9-19, 9-18, 9-17, 9-16, 9-15, 9-14, 9-13, 9-12, 9-11, 9-10, 10-20, 10-19, 10-18, 10-17, 10-16, 10-15, 10-14, 10-13, 10-12, 10-11, 11-20, 11-19, 11-18, 11-17, 11-16, 11-15, 11-14, 11-13, 11-12, 12-20, 12-19, 12-18, 12-17, 12-16, 12-15, 12-14, 12-13, 13-20, 13-19, 13-18, 13-17, 13-16, 13-15, 13-14, 14-20, 14-19, 14-18, 14-17, 14-16, 14-15, 15-20, 15-19, 15-18, 15-17, 15-16, 16-20, 16-19, 16-18, 16-17, 17-20, 17-19, 17-18, 18-20, 18-19, or 19-20.

[0138] It will be appreciated that the terms “bacterial strains,” “microbial strains” “microbes,” “bacterial cells” and “microorganisms” are used interchangeably herein.

[0139] Bacterial strains identified as described herein were compared with sequences in publicly available nucleic acid databases, such as Basic Local Alignment Search Tool (BLAST) to determine closely related genera and species and were analyzed using taxonomic assignment tools, such as RDP Classifier, which assign bacterial taxonomy to representative sequences.

[0140] 16S ribosomal DNA (16S rDNA) sequences encoding 16S ribosomal RNA (16S rRNA) are provided below for representative bacterial strains. The closest related identified bacterial species were determined based on whole genome sequence analysis and a combination of analysis of full length 16S rDNA sequences and the sequences of single-copy conserved genes compared to publicly available sequence databases. It should be appreciated that multiple bacterial strains disclosed herein may have the highest homology with the same species. In some embodiments, bacterial strains having the same or highly related 16S rDNA variable region sequences are phenotypically distinct. For example, two strains may differ phenotypically by growth rate, antibiotic resistance, phage resistance, cell wall thickness, motility, competence, spore-forming ability, rates of metabolite (e.g., VSC) degradation, ability to degrade a given metabolite, and/or ability to inhibit production of a given molecule. It should further be appreciated that the bacterial strains disclosed herein that have a 16S rDNA sequence with a nucleic acid sequence selected from the group consisting of SEQ ID NOs: 1-9, are also homologous to other strains based on their whole genome sequence, or subset of their whole genome sequence.

[0141] It should further be appreciated that the bacterial species described herein may be identified based on the nucleotide sequence of the full length 16S rDNA. Alternatively or in addition, the bacterial species described herein may be identified based on identification of 16S sequences through whole genome sequencing, and by comparing the sequences with 16S databases, or comparing the whole genome sequence, or a subset of their whole genome sequence to sequence databases.

[0142] It should be appreciated that the compositions (and/or nutritional supplements and/or dental supplements, food products, and/or oral care products comprising the same) may include fermentates of multiple strains of a particular species. In some embodiments, the composition includes multiple strains of a particular species that are obtained from independent sources, but the strains have the same or highly related 16S rDNA sequences.

[0143] Some embodiments relate to bacterial strains with 16S rDNA sequences that have sequence identity to a nucleic acid sequence of any one of the sequences of the bacterial strains or bacterial species described herein. In some embodiments, the bacterial strain has at least 60%, at least 70%, at least 80%, at least 81%, at least 82%, at least 83%, at least 84%, at least 85%, at least 86%, at least 87%, at least 88%, at least 89%, at least 90%, at least 91%, at least 92%, at least 93%, at least 94%, at least 95%, at least 96%, at least 97%, at least 98%, at least 99%, at least 99.5%, at least 99.6%, at least 99.7%, at least 99.8%, at least 99.9%, or up to 100% sequence identity relative to any of the bacterial strains or bacterial species described herein. “Identity” refers to the degree of sequence relatedness between or among sequences as determined by the number of matching positions between strings of two or more nucleotide sequences. “Percent (%) identity” or “percent (%) sequence identity” as it applies to nucleotide sequences is defined as the percentage of nucleotides in the candidate nucleotide sequence that are identical to the nucleotide sequence of a reference sequence after aligning the sequences and introducing gaps, as necessary, to achieve the maximum score allowed by the alignment algorithm and parameters.

[0144] Where an alignment between two sequences is contemplated, the first sequence (e.g., candidate sequence) is aligned to the second sequence (e.g., reference sequence) using the Needleman-Wunsch algorithm for global alignment of the two sequences. Needleman & Wunsch, J Mol Biol. 1970. 48:443-453. Where two nucleotide sequences are aligned, the alignment uses an EDNAFULL substitution scoring matrix, a Gap Open penalty of 10, a Gap Extend penalty of 0.5, and no End Gap penalties. The skilled artisan will appreciate that at the time of filing the instant specification, these parameters are the default parameters of the EMBOSS Needle pairwise comparison tool provided by European Bioinformatics Institute (see ebi.ac.uk). Other suitable alignment programs may be used to obtain a global alignment using these parameters, such as BLAST, or the Needleman-Wunsch algorithm may be implemented in a scripting language (e.g., Python).

[0145] The percent sequence identity that a candidate sequence (e.g., as present in a bacterial strain encompassed by a claim) has to a reference sequence (e.g., having a SEQ ID NO: specified herein and recited in a claim) is calculated by (i) aligning the candidate sequence to the reference sequence, (ii) determining the number of matching nucleotides between the aligned candidate and reference sequences, and (iii) dividing the number of matching nucleotides by the length of the reference sequence, including any internal gaps introduced into the reference sequence when the two sequences are aligned.

[0146] The skilled artisan will appreciate that to determine whether a candidate nucleotide sequence comprises a nucleotide sequence with a given percentage sequence identity to a reference sequence, the denominator (length of reference sequence plus internal gaps) in calculating percent identity need not include gaps shown extending past the ends of the reference sequence in an alignment. Such gaps are added where a candidate sequence contains additional nucleotides that extend beyond the portions of the candidate sequence that align to the 5′ end or 3′ end of the reference sequence.

[0147] Some embodiments relate to bacterial strains comprising a genome (i.e., a chromosome having a nucleotide sequence) with a specified average nucleotide identity (ANI) and/or alignment fraction (AF) to a reference genome. ANI refers to average nucleotide identity of a genome (e.g., as present in a bacterial strain recited in a claim) to a reference genome (e.g., as provided in an Accession No. or SEQ ID NO.), when comparing orthologous regions between the two genomes. The skilled artisan will understand that ANI is not a calculation of percent identity obtained by alignment of two full-length genome sequences. Rather, two genomes are compared to identify regions that are conserved between both genomes, and the average nucleotide identity of all conserved regions is calculated. Konstantinidis & Tiedje, Proc Natl Acad Sci USA. 2005. 102 (7): 2567-2572. Where ANI and/or AF are contemplated, these parameters are calculated using FastANI v1.34 and default configuration. See Jain et al., Nat Commun. 2018. 9 (1): 5114. A genome will be understood to require the following to be suitable for calculation of ANI to a reference genome: completeness as determined by detection of at least 100 single-copy BUSCO genes. See Simão et al., Bioinformatics. 2015. 31 (19): 3210-3212; Manni et al., Mol Biol Evol. 2021. 38 (10): 4647-4654.

[0148] As will be appreciated by one of ordinary skill in the art, nomenclature regarding bacterial genus and species names may be reclassified to reflect phylogenetic relationships of microorganisms. See, e.g., Zheng et al., Inter. J. System. And Evol. Microbiol. (2020) 70 (4).

[0149] Bacterial strains may be obtained from or derived from any suitable source, such as from a food source or an environmental source. As used herein, the term “derived from” in the context of bacterial strains derived from a particular source refers to obtaining a bacterial strain from the source, which may involve isolating and/or propagating cells of a bacterial strain. In some embodiments, the bacterial strains are further manipulated, such as purified and/or analyzed, prior to use. As will be evident to one of ordinary skill in the art, reference to a bacterial strain or cells of a bacterial strain that is derived from a particular source encompasses progeny cells thereof.

[0150] Bacterial strains may be derived from a fermented food or beverage, such as cultured milk and yogurt, natto, cheese, kombucha, wine, beer, cider, miso, kimchi, sauerkraut, fermented sausage, among others. Additionally, bacterial strains may be derived from cultured plants or plant protein isolates, including plants or proteins isolated from cereal grains (e.g., oats), oil seeds (e.g., sunflower seeds), legumes, pulses, beans, broad beans, faba beans, peas, chickpeas, cow peas, pigeon peas, lentils, Bambara beans, vetches, and lupins.

[0151] In some embodiments, at least one bacterial strain may be purified. In some embodiments, at least one bacterial strain may be isolated. Any of the bacterial strains described herein may be isolated and/or purified, for example, from a source such as a food source (e.g., a fermented food or beverage product) or an environmental source (e.g., soil).

### Compositions Comprising Fermentates

[0152] Aspects of the present disclosure relate to compositions comprising fermentates of bacterial strains. As used herein, the term “fermentate” refers to a product obtained by fermenting a bacterial strain in an environment suitable for fermentation, such as a culture medium (e.g., liquid medium). In some embodiments, the fermentate comprises products produced by the bacterial strain(s) during fermentation. In some embodiments, the fermentate comprises products produced by the bacterial strain(s) during fermentation and components of the culture medium. Mixtures of fermentates of different bacterial strains (e.g., a first fermentate of a first bacterial strain and a second fermentate of a second bacterial strain) may be produced by fermenting different bacterial strains separately and combining the resulting individual fermentates, or by fermenting multiple bacterial strains together.

[0153] In some embodiments, the bacteria are propagated or manufactured using liquid fermenters, which can support the rapid growth of bacterial species. The fermenters may be, for example, stirred tank reactors or disposable wave bioreactors. Culture media such as BL media and EG media, or similar versions of these media, can be used to support the growth of the bacterial species. The bacterial fermentate can be purified and concentrated from the fermentation broth by suitable techniques, such as centrifugation and filtration, and can optionally be dried and lyophilized by suitable techniques such as those known in the art.

[0154] In some embodiments, a composition comprising a fermentate of a bacterial strain does not comprise bacterial cells of the bacterial strain. For example, a fermentate may be separated from the bacterial cells that produced the fermentate (e.g., a culture supernatant). Bacterial cells may be separated from fermentate by any suitable method, such as centrifugation or filtration.

[0155] In some embodiments, a composition comprising a fermentate of a bacterial strain also comprises bacterial cells of the bacterial strain. In some embodiments, a composition does not comprise live bacterial cells. In some embodiments, the bacterial cells are heat-killed or pasteurized.

[0156] In some embodiments, one or more fermentates are in powder form. In some embodiments, each fermentate of a composition is in powder form. Powder is a dry, bulk solid comprised of many discrete, solid, macroscopic particles, which may flow freely when the powder (or a container in which the powder is present) is shaken or tilted. The skilled artisan will appreciate that powder form fermentates may be incorporated into a composition (e.g., with a carrier and in a defined form), where the composition as a whole has a solid form that is not a powder.

[0157] Any suitable method may be used to convert a bacterial fermentate to powder form. Non-limiting examples of powder production processes include grinding and agglomeration (e.g., of solid fermentates), crystallization and spray drying (e.g., of liquid fermentates). Advantages of converting a fermentate to powder form include, without limitation, ease of incorporation into a product intended for consumption (e.g., nutritional supplement or food product intended for ingestion or dental supplement intended for chewing), distribution throughout a product to limit the fermentate mixture's effect on taste and texture, and reduction of water activity to improve stability of desired components of a fermentate mixture.

[0158] In some embodiments, a bacterial fermentate mixture in powder form has a water content of 10% or less, 9% or less, 8% or less, 7% or less, 6% or less, 5% or less, 4% or less, 3% or less, 2% or less, or 1% or less.

[0159] In some embodiments, one or more fermentates are spray-dried or lyophilized. In some embodiments, one or more fermentates are spray-dried. In some embodiments, each fermentate of a composition is spray-dried. In some embodiments, one or more fermentates are lyophilized. In some embodiments, each fermentate of a composition is lyophilized. Where a fermentate is lyophilized and in powder form, powder may be lyophilized, or a lyophilized non-powder solid may be made into a powder form (e.g., by grinding and/or agglomeration).

[0160] Methods of lyophilizing compositions, specifically compositions comprising bacteria, are known in the art. See, e.g., U.S. Pat. Nos. 3,261,761; 4,205,132; and PCT Publication Nos. WO 2014/029578 and WO 2012/098358, herein incorporated by reference in their entirety. Fermentates may be lyophilized as a combination and/or the fermentates may be lyophilized separately and combined prior to incorporation into a composition, nutritional supplement, dental supplement, food product, and/or oral care product. A fermentate may be combined with a nutrient or carrier prior to combining it with another fermentate or multiple lyophilized fermentates may be combined while in lyophilized form and the mixture of fermentates, once combined may subsequently be combined with a nutrient and/or excipient. In some embodiments, the fermentate or combination thereof is a lyophilized cake. In such embodiments, the fermentate(s) may be rehydrated or suspended and/or cultured prior to use. In some embodiments, the fermentate(s) in lyophilized form are used directly, for example, without rehydrating or suspension (e.g., directly added to a medium).

[0161] The process of spray-drying refers to production of a dry powder from a liquid comprising a component, such as a fermentate. See, e.g., Ledet et al., Spray-Drying of Pharmaceuticals in “Lyophilized Biologics and Vaccines” pages 273-194, Springer. In general, the process involves rapidly drying the fermentates with a hot gas. A fermentate may be combined with an excipient or nutrient prior to combining it with other fermentates, or multiple spray-dried fermentates may be combined while in spray-dried form and the mixture of fermentates, once combined, may be subsequently combined with an excipient, carrier, or nutrient.

[0162] The amount of fermentate in a composition is quantified according to dry weight of the fermentate. In some embodiments, a fermentate is present in a composition at an amount of 10 to 500 mg. In some embodiments, a fermentate is present in a composition at an amount of 10 to 450, 10 to 400, 10 to 350, 10 to 300, 10 to 250, 10 to 200, 10 to 150, 10 to 100, or 10 to 50 mg. In some embodiments, a fermentate is present in a composition at an amount of 50 to 500, 100 to 500, 150 to 500, 200 to 500, 250 to 500, 300 to 500, 350 to 500, 400 to 500, or 450 to 500 mg. In some embodiments, a fermentate is present in a composition at an amount of 10 to 50, 50 to 100, 100 to 150, 150 to 200, 200 to 250, 250 to 300, 300 to 350, 350 to 400, 400 to 450, or 450 to 500 mg.

[0163] In some embodiments, the total mass of fermentates in a composition is 10 to 500 mg. In some embodiments, the total mass of fermentates in a composition is 10 to 450, 10 to 400, 10 to 350, 10 to 300, 10 to 250, 10 to 200, 10 to 150, 10 to 100, or 10 to 50 mg. In some embodiments, the total mass of fermentates in a composition is 50 to 500, 100 to 500, 150 to 500, 200 to 500, 250 to 500, 300 to 500, 350 to 500, 400 to 500, or 450 to 500 mg. In some embodiments, the total mass of fermentates in a composition is 10 to 50, 50 to 100, 100 to 150, 150 to 200, 200 to 250, 250 to 300, 300 to 350, 350 to 400, 400 to 450, or 450 to 500 mg.

### Nutritional Supplements, Dental Supplements, Food Products, and Oral Care Products

[0164] Some aspects relate to a nutritional supplement comprising any of the compositions or fermentates described herein. Some aspects relate to a dental supplement comprising any of the compositions or fermentates described herein. Some aspects relate to a food product comprising any of the compositions or fermentates described herein. Some aspects relate to an oral care product comprising any of the compositions or fermentates described herein. Food products and nutritional supplements are, in general, intended for the consumption of a human or other animal, such as a companion animal (e.g., a dog), or a bird. As will be appreciated by one of ordinary skill in the art, a food product provides a primary caloric and nutritive source intended for consumption by a subject (e.g., a feed or treat). In contrast, a nutritional supplement is not intended to provide a primary caloric or nutritive source for a subject but rather provides a targeted effect. Nutritional supplements may provide additional nutrients or functional ingredients that complement a standard diet, e.g., a standard pet diet. Dental supplements may be consumed, or be chewed without consuming (e.g., chewed and then spit out), by a human or other animal. Dental supplements are useful, for example, to exercise an animal's teeth and jaws, and to remove bacterial biofilm, plaque, tartar, and/or dental calculus. Any of the bacterial strains, fermentates thereof, or combinations thereof described herein may be present in a nutritional supplement, dental supplement, or food product. The compositions disclosed herein can be used in a food or beverage, such as a health food, a pet food, a functional food, a dietary supplement, a food or beverage for patients, or an animal feed.

[0165] Non-limiting examples of the forms of nutritional and/or dental supplements include carbohydrate-containing foods such as rice food products; paste products such as fish hams, sausages, paste products of seafood; pouch products. Further, the examples also include food products, nutritional supplements, and dental supplements prepared in the forms of powders, granules, kibbles, tablets, capsules, liquids, pastes, chews, and jellies.

[0166] Any suitable form may be used for a food product, nutritional supplement, or dental supplement. Non-limiting examples of form factors include dental sticks, dental chews, chews with softer interiors than exteriors, kibbles, and spreads. Additional examples of form factors include a gelatinized starch matrix, extruded or injection-molded dental stick, extruded or injection-molded dental chew, chew having a soft interior, powder meal topper, water additive, dry kibble or food, wet food, frozen food, liquid spray, peanut butter spread, and soft jerky chew.

[0167] In some embodiments, the nutritional or dental supplement is an extruded dental stick. In some embodiments, the nutritional or dental supplement is an injection-molded dental stick. In some embodiments, the nutritional or dental supplement is a chew having a soft interior. In some embodiments, the food product, nutritional supplement or dental supplement is a kibble. In some embodiments, the kibble is an extruded kibble. Extruded and/or injection-molded chews, sticks, and kibbles are known in the art, and any suitable method may be used to manufacture such chews, sticks, and kibbles.

[0168] In some embodiments, the food product, nutritional supplement or dental supplement is in the form of a wet food. In some embodiments, the food product, nutritional supplement or dental supplement is in the form of a frozen food. Wet foods and frozen foods may be in any suitable form, such as those described in Niamnuy, C., & Devahastin, S. (2010). 11 Pet Foods and Their Physicochemical Properties as Affected by Processing. Contemporary Food Engineering, 327.

[0169] In some embodiments, the food product, nutritional supplement, or dental supplement is a soft jerky chew. Jerky chews may be made from any suitable starting material, such as dried meat. In some embodiments, the food product, nutritional supplement, or dental supplement is a spread. In some embodiments, the spread comprises one or more nuts. In some embodiments, the spread is a peanut butter spread. The skilled artisan will appreciate that a food product or supplement intended for consumption by a particular animal will not contain ingredients that are toxic to that animal (e.g., macadamia nuts for dogs).

[0170] In some embodiments, the nutritional supplement is an additive. Additives may be added to other foods or food products before consumption by an animal. In some embodiments, the nutritional supplement is a water additive. Water additives are added to drinking water. In some embodiments, the nutritional supplement is a meal topper. Meal toppers may be added directly to food before consumption, with or without incorporation before consumption. In some embodiments, the meal topper is in powder form (a powder meal topper). In some embodiments, the nutritional supplement is a liquid spray. Liquid sprays may be administered directly to an animal, or sprayed on food or in water, with or without incorporation before consumption.

[0171] In some embodiments, the nutritional supplement, dental supplement, or food product comprises a fermentate or combination thereof, and a carrier. The carrier may contain any combination of nutrients, excipients, diluents, and/or binders. In some embodiments, the carrier comprises one or more of the following compounds: water, glycerol, ethylene glycol, 1,2-propylene glycol or 1,3-propylene glycol, sodium chloride, sodium benzoate, potassium sorbate, sodium sulfate, potassium sulfate, magnesium sulfate, sodium thiosulfate, calcium carbonate, sodium citrate, dextrin, maltodextrin, glucose, sucrose, sorbitol, lactose, whey, whey permeate, wheat flour, wheat bran, corn gluten meal, starch and cellulose. In some embodiments, the carrier is a gelatinized starch matrix. In some embodiments, the carrier is maltodextrin. In some embodiments, the carrier is a tapioca-based maltodextrin. Any suitable method may be used to obtain maltodextrin from tapioca, such as isolation from a tapioca plant.

[0172] In some embodiments, the carrier is present in a 2:1, 3:1, 4:1, 5:1, 6:1, 7:1, 8:1, 9:1, or 10:1 ratio by weight relative to the total amount of fermentates. In some embodiments, the carrier is present in a 1:2, 1:3, 1:4, 1:5, 1:6, 1:7, 1:8, 1:9, or 1:10 ratio by weight relative to the total amount of fermentates. In some embodiments, the carrier is present in a 2:1 ratio by weight relative to the total amount of fermentates. In some embodiments, the carrier is present in a 1:1 ratio by weight relative to the total amount of fermentates. In some embodiments, the carrier is present in a 2:1 ratio by weight relative to each fermentate. In some embodiments, the carrier is present in a 1:1 ratio by weight relative to each fermentate. In some embodiments, the carrier is present in a 1:1 ratio by weight relative to each of three fermentates. In some embodiments, the carrier is present in a 2:1 ratio by weight relative to each of two fermentates.

[0173] In some embodiments, a nutritional supplement, dental supplement, food product, and/or oral care product comprises a composition comprising fermentate(s) at an incorporation rate of 0.01% to 20% w/w. As used herein, an “incorporation rate” refers to the weight of the fermentate-containing composition as a percentage of the total weight of the nutritional supplement, or food product. For example, 10 mg of a fermentate-containing composition in a 50 g supplement is present at an incorporation rate of 0.2% w/w. In some embodiments, the incorporation rate is 0.01% to 20% w/w. In some embodiments, the incorporation rate is 0.01% to 15% w/w. In some embodiments, the incorporation rate is 0.01% to 10% w/w. In some embodiments, the incorporation rate is 0.01% to 5% w/w. In some embodiments, the incorporation rate is 0.1% to 10% w/w. In some embodiments, the incorporation rate is 0.1% to 2% w/w.

[0174] In some embodiments, the incorporation rate is 0.02% to 10%, 0.03% to 10%, 0.04% to 10%, 0.05% to 10%, 0.06% to 10%, 0.07% to 10%, 0.08% to 10%, 0.09% to 10%, 0.1% to 10%, 0.2% to 10%, 0.3% to 10%, 0.4% to 10%, 0.5% to 10%, 0.6% to 10%, 0.7% to 10%, 0.8% to 10%, 0.9% to 10%, 1% to 10%, 2% to 10%, 3% to 10%, 4% to 10%, 5% to 10%, 6% to 10%, 7% to 10%, 8% to 10%, or 9% to 10% w/w. In some embodiments, the incorporation rate is 0.1% to 10%, 0.1% to 9%, 0.1% to 8%, 0.1% to 7%, 0.1% to 6%, 0.1% to 5%, 0.1% to 4%, 0.1% to 3%, 0.1% to 2%, or 0.1% to 1% w/w. In some embodiments, the incorporation rate is 0.1% to 2%, 2% to 4%, 4% to 6%, 6% to 8%, 8% to 10%, 10% to 15%, or 15% to 20% w/w. In some embodiments, a nutritional supplement, dental supplement, food product, and/or oral care product comprises a certain mass of a composition comprising fermentate(s). Defined masses of compositions are useful, for example, for supplements, food products, and/or oral care products that may be diluted in food or water before consumption. In some embodiments, 2 to 2,000 mg of a fermentate-containing composition is present in a nutritional supplement, dental supplement, food product, and/or oral care product. In some embodiments, 20 to 2,000, 20 to 1,800, 20 to 1,600, 20 to 1,400, 20 to 1,200, 20 to 1,000, 20 to 900, 20 to 800, 20 to 700, 20 to 600, 20 to 500, 20 to 400, 20 to 300, 20 to 200, 20 to 100, or 20 to 50 mg of the composition is present. In some embodiments, 50 to 2,000, 100 to 2,000, 200 to 2,000, 300 to 2,000, 400 to 2,000, 500 to 2,000, 600 to 2,000, 700 to 2,000, 800 to 2,000, 900 to 2,000, 1,000 to 2,000, 1,200 to 2,000, 1,400 to 2,000, 1,600 to 2,000, or 1,800 to 2,000 mg of the composition is present. In some embodiments, 100 to 200, 200 to 300, 300 to 400, 400 to 500, 500 to 600, 600 to 700, 700 to 800, 800 to 900, 1,000 to 1,200, 1,200 to 1,400, 1,400 to 1,600, 1,600 to 1,800, or 1,800 to 2,000 mg of the composition is present. In some embodiments, 0.01 to 0.1, 0.1 to 1, 1 to 10, 10 to 100, 100 to 1,000, or 1,000 to 10,000 mg of the composition is present.

[0175] A nutritional supplement, dental supplement, food product, and/or oral care product may comprise one or more nutrients. The nutrient may be a carbohydrate or carbohydrate source. Non-limiting examples of carbohydrate sources include grains, such as corn, rice, milo, sorghum, barley, alfalfa, oats, and wheat. In some embodiments, the nutrient is a grain. In some embodiments, the nutrient is wheat, corn, rice, oats, and/or barley. A nutritional supplement, dental supplement, food product, and/or oral care product may comprise a gelatinized starch matrix. Matrices of gelatinized starch may comprise any suitable starch, such as a starch listed herein or another starch known in the art.

[0176] A nutritional supplement, dental supplement, food product, and/or oral care product may comprise a fiber. Fibers may add bulk to a composition and may be fermented by intestinal bacteria to produce short-chain fatty acids and other metabolites. Non-limiting examples of fibers include tapioca fiber, beet pulp (e.g., sugar beet pulp), gum arabic, gum talha, psyllium, rice bran, carob bean gum, citrus pulp, pectin, fructooligosaccharide, mannaoligofructose, soy fiber, arabinogalactan, galactooligosaccharide, arabinoxylan, chicory pulp, chicory, coconut endosperm fiber, wheat fiber, and inulin.

[0177] A nutritional supplement, dental supplement, food product, and/or oral care product may comprise an algal strain. Algae may add one or more nutrients and/or bulk to a composition. Non-limiting examples of algae include Ascophyllum nodosum, Spirulina (e.g., Arthrospira platensis, Arthrospira fusiformis, and Arthrospira maxima), Chlorella, Ulva lactuca, Laminaria digitata and Fucus vesiculosus.

[0178] A nutritional supplement, dental supplement, food product, and/or oral care product may comprise one or more inorganic minerals. Non-limiting examples of minerals include calcium carbonate, calcium, boron, selenium, calcium chloride, chloride, ferrous fumarate, zinc acetate, choline chloride, chromium, ferrous gluconate, zinc sulfate, chromium, tripicolinate, cobalt, magnesium oxide, zinc gluconate, dicalcium phosphate, copper, magnesium sulfate, ferrous sulfate, iodine, magnesium carbonate, monosodium phosphate, iron, chromium picolinate, potassium chloride, magnesium, calcium citrate, potassium citrate, manganese, calcium lactate, potassium sorbate, phosphorus, calcium gluconate, sodium bisulfate, potassium, chromium chloride, sodium hexametaphosphate, sodium, chromium nicotinate, tricalcium phosphate, zinc, and chromium citrate.

[0179] A nutritional supplement, dental supplement, food product, and/or oral care product may comprise one or more protein sources. Non-limiting examples of such protein sources include chicken meals, chicken, chicken byproduct meals, eggs, lamb, lamb meals, turkey, turkey meals, beef, beef by-products, viscera, fish, fish meal, enterals, kangaroo, white fish, venison, blood marrow, bone marrow, soybean meal, soy protein isolate, and soy protein concentrate.

[0180] A nutritional supplement, dental supplement, food product, and/or oral care product may comprise one or more starches. Non-limiting examples of such starches include cereals, grains, corn, wheat, rice, oats, corn grits, sorghum, grain sorghum, milo, wheat bran, oat bran, amaranth, durum, and semolina.

[0181] A nutritional supplement, dental supplement, food product, and/or oral care product may comprise one or more dairy products. Dairy products include, without limitation, cream, milk, butter, and cheese.

[0182] A nutritional supplement, dental supplement, food product, and/or oral care product may comprise a meat or animal-derived material (e.g., animal-derived protein source). In some embodiments, the meat or animal-derived material is beef, chicken, eggs, turkey, lamb, fish, blood marrow, bone marrow, or a combination of any thereof.

[0183] An oral care product may be in any form suitable for delivery of a composition (e.g., one or more fermentates) to the oral cavity. In some embodiments, an oral care product is a toothpaste. In some embodiments, an oral care product is a mouthwash. In some embodiments, an oral care product is a breath mint. In some embodiments, an oral care product is a chewing gum.

### Methods of Use

[0184] Some aspects of the present disclosure relate to administration of a composition (and/or nutritional supplement, dental supplement, food product, and/or oral care product comprising the same) to a subject in need thereof. Administration may be accomplished through any suitable method, such as one described herein or known in the art, and may include, for example, consumption of the composition (and/or nutritional supplement, dental supplement, food product, and/or oral care product) by the subject.

[0185] In some embodiments, administration is oral. Oral administration may refer to manual administration, such as oral gavage or spraying (e.g., via aerosol). Oral administration may also refer to feeding, such as providing the composition or nutritional supplement to a subject (e.g., a companion animal), which ingests it by eating or drinking.

[0186] In some embodiments, administration is by application to the oral cavity. In some embodiments, oral administration is performed without ingesting the composition. In some embodiments, oral administration comprises maintaining the presence of the composition in the oral cavity and releasing the composition from the oral cavity without swallowing the composition. In some embodiments, oral administration comprises maintaining the presence of the composition in the oral cavity until it is dissolved. In some embodiments, oral administration comprises maintaining the presence of composition in the oral cavity for at least 30 seconds, at least 1 minute, at least 2 minutes, at least 3 minutes, at least 4 minutes, at least 5 minutes, at least 10 minutes, at least 15 minutes, at least 20 minutes, or at least 30 minutes. In some embodiments, the composition is applied using a toothbrush. In some embodiments, oral administration comprises chewing the composition and not swallowing.

[0187] Methods may include a single administration or administration may be repeated. Repeat administrations may be conducted at regular intervals (e.g., daily or weekly). For example, a subject may be administered a composition or supplement one or more times daily, over a specified time period, such as a week, several weeks, a month, or several months. Alternatively, multiple instances of administration may be conducted on an as-needed basis.

[0188] In some embodiments, administration is rectal. In some embodiments, a composition, supplement, or food product is in the form of a suppository when administered rectally. In some embodiments, a composition, supplement, or food product is delivered to the intestine. In some embodiments, a composition, supplement, or food product is delivered to the colon. Such delivery to the intestine or colon may be accomplished by oral or rectal administration.

[0189] In some embodiments, a composition, nutritional supplement, dental supplement, or food product is administered in an effective amount for treating, preventing, or alleviating one or more symptoms in a subject. An “effective amount” or “effective dosage” refers to an amount or dosage, respectively, sufficient to treat, alleviate, or prevent a sign or symptom in a subject. The actual effective amount or dosage will depend on the individual subject and their health. Such effective amounts or dosages may be determined by routine assays known to those of skill in the art.

[0190] Subjects to which a composition, supplement, or food product may be administered include any animal known in the art. In some embodiments, the subject is a human. In some embodiments, the animal is a domesticated animal. In some embodiments, the animal is a carnivore. In some embodiments, the animal is a rodent. In some embodiments, the rodent is a mouse, rat, guinea pig, chinchilla, or hamster. In some embodiments, the animal is a dog, cat, rabbit, guinea pig, hamster, or ferret. In some embodiments, the animal is a dog. In some embodiments, the animal is a bovine, swine, llama, alpaca, sheep, or goat. In some embodiments, the animal is a bird.

[0191] In some embodiments, the composition, nutritional supplement, dental supplement, food product, and/or oral care product is effective in reducing one or more symptoms, such as bad breath, gingivitis, dental calculus buildup, inflammation, diarrhea, vomiting, itching, constipation, lack of appetite, lethargy, arthritis, excessive grooming, abdominal pain, and fever. In some embodiments, the composition, nutritional supplement, dental supplement, food product, and/or oral care product treats or prevents bad breath in the subject. In some embodiments, the composition, nutritional supplement, dental supplement, food product, and/or oral care product treats or prevents gingivitis in the subject. In some embodiments, the composition, nutritional supplement, dental supplement, food product, and/or oral care product treats or prevents dental calculus buildup in the subject. In some embodiments, the composition, nutritional supplement, dental supplement, food product, and/or oral care product treats or prevents diarrhea in the subject. In some embodiments, the composition, nutritional supplement, dental supplement, food product, and/or oral care product treats or prevents vomiting or nausea in the subject.

[0192] In some embodiments, a composition, nutritional supplement, dental supplement, food product, and/or oral care product is administered to a subject having halitosis. Signs and symptoms of halitosis include unpleasant breath containing one or more volatile sulfur compounds, gingivitis, and accumulation of plaque, tartar, and/or dental calculus on teeth of the subject. In some embodiments, the oral microenvironment of the subject comprises one or more microorganisms associated with halitosis. Exemplary microorganisms associated with halitosis include, without limitation, Porphyromonas gingivalis, Prevotella intermedia, Porphyromonas canigingivalis, Tannerella forsythia, Treponema denticola, Fusobacterium nucleatum, Neisseria canis, and Bergeyella zoohelcum. In some embodiments, the subject's oral microenvironment comprises Porphyromonas gingivalis. In some embodiments, the subject's oral microenvironment comprises Prevotella intermedia. In some embodiments, the subject's oral microenvironment comprises Porphyromonas canigingivalis. In some embodiments, the subject's oral microenvironment comprises Tannerella forsythia. In some embodiments, the subject's oral microenvironment comprises Treponema denticola. In some embodiments, the subject's oral microenvironment comprises Fusobacterium nucleatum. In some embodiments, the subject's oral microenvironment comprises Neisseria canis. In some embodiments, the subject's oral microenvironment comprises Bergeyella zoohelcum.

[0193] Any suitable method may be used to determine whether a subject's oral microenvironment comprises a given microorganism. For example, culture-based methods, microscopy-based methods, 16S rDNA sequencing, and/or whole-genome sequencing-based methods may be performed on a sample obtained from a subject's oral microenvironment. In some embodiments, one or more microorganisms is present in a saliva sample. In some embodiments, one or more microorganisms is present on oral mucosa of a subject. In some embodiments, one or more microorganisms is present on the tongue of a subject. In some embodiments, one or more microorganisms is present on a tooth of a subject.

[0194] In some embodiments, the composition, nutritional supplement, dental supplement, food product, and/or oral care product is effective in treating or preventing one or more symptoms or adverse events in a subject. As discussed above, the compositions reduce VSC abundance, inhibit VSC production, and/or reduce an alkaline oral environment, thereby improving halitosis. In some embodiments, the composition, nutritional supplement, dental supplement, food product, and/or oral care product reduces VSC abundance in the subject. Methods of measuring VSC abundance are known in the art, and include, without limitation, measuring the concentration of one or more VSCs (e.g., hydrogen sulfide, methyl mercaptan, and dimethyl sulfide) in the subject, such as in a sample obtained from the oral microenvironment (e.g., a breath or saliva sample).

[0195] In some embodiments, the composition, nutritional supplement, dental supplement, food product, and/or oral care product reduces inflammation in the subject. In some embodiments, the composition, nutritional supplement, dental supplement, food product, and/or oral care product treats or prevents one or more symptoms associated with inflammation. Methods of measuring inflammation are known in the art, and include, without limitation, measuring the concentration of one or more cytokines (e.g., TNF-α, IL-1β, IL-6, IL-10, and IL-12) in the subject, such as in a sample obtained from the subject (e.g., a blood sample, serum sample, plasma sample). In some embodiments, the composition, nutritional supplement, dental supplement, food product, and/or oral care product reduces infiltration of leukocytes (e.g., neutrophils and/or monocytes) into oral mucosa. In some embodiments, the composition, nutritional supplement, dental supplement, food product, and/or oral care product reduces the rate of plaque accumulation, compared to a reference subject (e.g., a subject that has not been administered the composition or nutritional supplement). In some embodiments, the composition, nutritional supplement, dental supplement, food product, and/or oral care product reduces the rate of tartar accumulation, compared to a reference subject (e.g., a subject that has not been administered the composition or nutritional supplement). In some embodiments, the composition, nutritional supplement, dental supplement, food product, and/or oral care product reduces the rate of dental calculus accumulation, compared to a reference subject (e.g., a subject that has not been administered the composition or nutritional supplement).

[0196] In some embodiments, administration results in a decrease in abundance of dental plaque by at least 5%, 6%, 7%, 8%, 9%, 10%, 11%, 12%, 13%, 14%, 15%, 16%, 17%, 18%, 19%, 20%, 21%, 22%, 23%, 24%, 25%, 26%, 27%, 28%, 29%, 30%, 35%, 40%, 45%, 50%, 55%, 60%, 65%, 70%, 75%, 80%, 85%, 90%, 95%, or 100%, as compared to the abundance of dental plaque prior to administering the composition. In some embodiments, administration of a composition results in decrease in the abundance of dental plaque by at least 5%, 6%, 7%, 8%, 9%, 10%, 11%, 12%, 13%, 14%, 15%, 16%, 17%, 18%, 19%, 20%, 21%, 22%, 23%, 24%, 25%, 26%, 27%, 28%, 29%, 30%, 35%, 40%, 45%, 50%, 55%, 60%, 65%, 70%, 75%, 80%, 85%, 90%, 95%, 100%, 125%, 150% or more, as compared to the abundance of dental plaque in a subject (e.g., a reference subject) who did not receive the composition.

[0197] In some embodiments, administration results in a decrease in abundance of dental tartar by at least 5%, 6%, 7%, 8%, 9%, 10%, 11%, 12%, 13%, 14%, 15%, 16%, 17%, 18%, 19%, 20%, 21%, 22%, 23%, 24%, 25%, 26%, 27%, 28%, 29%, 30%, 35%, 40%, 45%, 50%, 55%, 60%, 65%, 70%, 75%, 80%, 85%, 90%, 95%, or 100%, as compared to the abundance of dental tartar prior to administering the composition. In some embodiments, administration of a composition results in decrease in the abundance of dental tartar by at least 5%, 6%, 7%, 8%, 9%, 10%, 11%, 12%, 13%, 14%, 15%, 16%, 17%, 18%, 19%, 20%, 21%, 22%, 23%, 24%, 25%, 26%, 27%, 28%, 29%, 30%, 35%, 40%, 45%, 50%, 55%, 60%, 65%, 70%, 75%, 80%, 85%, 90%, 95%, 100%, 125%, 150% or more, as compared to the abundance of dental tartar in a subject (e.g., a reference subject) who did not receive the composition.

[0198] In some embodiments, administration results in a decrease in abundance of dental calculus by at least 5%, 6%, 7%, 8%, 9%, 10%, 11%, 12%, 13%, 14%, 15%, 16%, 17%, 18%, 19%, 20%, 21%, 22%, 23%, 24%, 25%, 26%, 27%, 28%, 29%, 30%, 35%, 40%, 45%, 50%, 55%, 60%, 65%, 70%, 75%, 80%, 85%, 90%, 95%, or 100%, as compared to the abundance of dental calculus prior to administering the composition. In some embodiments, administration of a composition results in decrease in the abundance of dental calculus by at least 5%, 6%, 7%, 8%, 9%, 10%, 11%, 12%, 13%, 14%, 15%, 16%, 17%, 18%, 19%, 20%, 21%, 22%, 23%, 24%, 25%, 26%, 27%, 28%, 29%, 30%, 35%, 40%, 45%, 50%, 55%, 60%, 65%, 70%, 75%, 80%, 85%, 90%, 95%, 100%, 125%, 150% or more, as compared to the abundance of dental calculus in a subject (e.g., a reference subject) who did not receive the composition.

[0199] In some embodiments, administration of a composition results in a decrease in abundance of one or more microorganisms in the subject (or microbiome thereof) by at least 1.1-fold, 1.2-fold, 1.3-fold, 1.4-fold, 1.5-fold, 2-fold, 3-fold, 4-fold, 5-fold, 6-fold, 7-fold, 8-fold, 9-fold, 10-fold, 20-fold, 30-fold, 40-fold, 50-fold, 100-fold, 1000-fold, 10⁴-fold, 10⁵-fold or more, as compared to the abundance of one or more microorganisms in the subject (or microbiome thereof) prior to administering the composition. In some embodiments, administration of the composition results in a decrease in abundance of one or more microorganisms in the subject (or microbiome thereof) by at least 1.1-fold, 1.2-fold, 1.3-fold, 1.4-fold, 1.5-fold, 2-fold, 3-fold, 4-fold, 5-fold, 6-fold, 7-fold, 8-fold, 9-fold, 10-fold, 20-fold, 30-fold, 40-fold, 50-fold, 100-fold, 1000-fold, 10⁴-fold, 10⁵-fold or more, as compared to the abundance of one or more microorganisms in another subject (e.g., a reference subject) (or microbiome thereof) who did not receive the composition.

[0200] In some embodiments, administration results in a decrease in abundance of one or more microorganisms in the subject (or microbiome thereof) by at least 5%, 6%, 7%, 8%, 9%, 10%, 11%, 12%, 13%, 14%, 15%, 16%, 17%, 18%, 19%, 20%, 21%, 22%, 23%, 24%, 25%, 26%, 27%, 28%, 29%, 30%, 35%, 40%, 45%, 50%, 55%, 60%, 65%, 70%, 75%, 80%, 85%, 90%, 95%, or 100%, as compared to the abundance of the microorganism in the subject (or microbiome thereof) prior to administering the composition. In some embodiments, administration of a composition results in decrease in the abundance of one or more microorganisms in the subject (or microbiome thereof) by at least 5%, 6%, 7%, 8%, 9%, 10%, 11%, 12%, 13%, 14%, 15%, 16%, 17%, 18%, 19%, 20%, 21%, 22%, 23%, 24%, 25%, 26%, 27%, 28%, 29%, 30%, 35%, 40%, 45%, 50%, 55%, 60%, 65%, 70%, 75%, 80%, 85%, 90%, 95%, 100%, 125%, 150% or more, as compared to the abundance of the microorganisms in a subject (e.g., a reference subject) (or microbiome thereof) who did not receive the composition.

[0201] In some embodiments, administration of a composition results in a decrease in abundance of Porphyromonas gingivalis in the subject (or microbiome thereof) by at least 1.1-fold, 1.2-fold, 1.3-fold, 1.4-fold, 1.5-fold, 2-fold, 3-fold, 4-fold, 5-fold, 6-fold, 7-fold, 8-fold, 9-fold, 10-fold, 20-fold, 30-fold, 40-fold, 50-fold, 100-fold, 1000-fold, 10⁴-fold, 10⁵-fold or more, as compared to the abundance of Porphyromonas gingivalis in the subject (or microbiome thereof) prior to administering the composition. In some embodiments, administration of the composition results in a decrease in abundance of Porphyromonas gingivalis in the subject (or microbiome thereof) by at least 1.1-fold, 1.2-fold, 1.3-fold, 1.4-fold, 1.5-fold, 2-fold, 3-fold, 4-fold, 5-fold, 6-fold, 7-fold, 8-fold, 9-fold, 10-fold, 20-fold, 30-fold, 40-fold, 50-fold, 100-fold, 1000-fold, 10⁴-fold, 10⁵-fold or more, as compared to the abundance of Porphyromonas gingivalis in another subject (e.g., a reference subject) (or microbiome thereof) who did not receive the composition.

[0202] In some embodiments, administration results in a decrease in abundance of Porphyromonas gingivalis in the subject (or microbiome thereof) by at least 5%, 6%, 7%, 8%, 9%, 10%, 11%, 12%, 13%, 14%, 15%, 16%, 17%, 18%, 19%, 20%, 21%, 22%, 23%, 24%, 25%, 26%, 27%, 28%, 29%, 30%, 35%, 40%, 45%, 50%, 55%, 60%, 65%, 70%, 75%, 80%, 85%, 90%, 95%, or 100%, as compared to the abundance of Porphyromonas gingivalis in the subject (or microbiome thereof) prior to administering the composition. In some embodiments, administration of a composition results in decrease in the abundance of Porphyromonas gingivalis in the subject (or microbiome thereof) by at least 5%, 6%, 7%, 8%, 9%, 10%, 11%, 12%, 13%, 14%, 15%, 16%, 17%, 18%, 19%, 20%, 21%, 22%, 23%, 24%, 25%, 26%, 27%, 28%, 29%, 30%, 35%, 40%, 45%, 50%, 55%, 60%, 65%, 70%, 75%, 80%, 85%, 90%, 95%, 100%, 125%, 150% or more, as compared to the abundance of Porphyromonas gingivalis in a subject (e.g., a reference subject) (or microbiome thereof) who did not receive the composition.

[0203] In some embodiments, administration of a composition results in a decrease in abundance of Prevotella intermedia in the subject (or microbiome thereof) by at least 1.1-fold, 1.2-fold, 1.3-fold, 1.4-fold, 1.5-fold, 2-fold, 3-fold, 4-fold, 5-fold, 6-fold, 7-fold, 8-fold, 9-fold, 10-fold, 20-fold, 30-fold, 40-fold, 50-fold, 100-fold, 1000-fold, 10⁴-fold, 10⁵-fold or more, as compared to the abundance of Prevotella intermedia in the subject (or microbiome thereof) prior to administering the composition. In some embodiments, administration of the composition results in a decrease in abundance of Prevotella intermedia in the subject (or microbiome thereof) by at least 1.1-fold, 1.2-fold, 1.3-fold, 1.4-fold, 1.5-fold, 2-fold, 3-fold, 4-fold, 5-fold, 6-fold, 7-fold, 8-fold, 9-fold, 10-fold, 20-fold, 30-fold, 40-fold, 50-fold, 100-fold, 1000-fold, 10⁴-fold, 10⁵-fold or more, as compared to the abundance of Prevotella intermedia in another subject (e.g., a reference subject) (or microbiome thereof) who did not receive the composition.

[0204] In some embodiments, administration results in a decrease in abundance of Prevotella intermedia in the subject (or microbiome thereof) by at least 5%, 6%, 7%, 8%, 9%, 10%, 11%, 12%, 13%, 14%, 15%, 16%, 17%, 18%, 19%, 20%, 21%, 22%, 23%, 24%, 25%, 26%, 27%, 28%, 29%, 30%, 35%, 40%, 45%, 50%, 55%, 60%, 65%, 70%, 75%, 80%, 85%, 90%, 95%, or 100%, as compared to the abundance of Prevotella intermedia in the subject (or microbiome thereof) prior to administering the composition. In some embodiments, administration of a composition results in decrease in the abundance of Prevotella intermedia in the subject (or microbiome thereof) by at least 5%, 6%, 7%, 8%, 9%, 10%, 11%, 12%, 13%, 14%, 15%, 16%, 17%, 18%, 19%, 20%, 21%, 22%, 23%, 24%, 25%, 26%, 27%, 28%, 29%, 30%, 35%, 40%, 45%, 50%, 55%, 60%, 65%, 70%, 75%, 80%, 85%, 90%, 95%, 100%, 125%, 150% or more, as compared to the abundance of Prevotella intermedia in a subject (e.g., a reference subject) (or microbiome thereof) who did not receive the composition.

[0205] In some embodiments, administration of a composition results in a decrease in abundance of Porphyromonas canigingivalis in the subject (or microbiome thereof) by at least 1.1-fold, 1.2-fold, 1.3-fold, 1.4-fold, 1.5-fold, 2-fold, 3-fold, 4-fold, 5-fold, 6-fold, 7-fold, 8-fold, 9-fold, 10-fold, 20-fold, 30-fold, 40-fold, 50-fold, 100-fold, 1000-fold, 10⁴-fold, 10⁵-fold or more, as compared to the abundance of Porphyromonas canigingivalis in the subject (or microbiome thereof) prior to administering the composition. In some embodiments, administration of the composition results in a decrease in abundance of Porphyromonas canigingivalis in the subject (or microbiome thereof) by at least 1.1-fold, 1.2-fold, 1.3-fold, 1.4-fold, 1.5-fold, 2-fold, 3-fold, 4-fold, 5-fold, 6-fold, 7-fold, 8-fold, 9-fold, 10-fold, 20-fold, 30-fold, 40-fold, 50-fold, 100-fold, 1000-fold, 10⁴-fold, 10⁵-fold or more, as compared to the abundance of Porphyromonas canigingivalis in another subject (e.g., a reference subject) (or microbiome thereof) who did not receive the composition.

[0206] In some embodiments, administration results in a decrease in abundance of Porphyromonas canigingivalis in the subject (or microbiome thereof) by at least 5%, 6%, 7%, 8%, 9%, 10%, 11%, 12%, 13%, 14%, 15%, 16%, 17%, 18%, 19%, 20%, 21%, 22%, 23%, 24%, 25%, 26%, 27%, 28%, 29%, 30%, 35%, 40%, 45%, 50%, 55%, 60%, 65%, 70%, 75%, 80%, 85%, 90%, 95%, or 100%, as compared to the abundance of Porphyromonas canigingivalis in the subject (or microbiome thereof) prior to administering the composition. In some embodiments, administration of a composition results in decrease in the abundance of Porphyromonas canigingivalis in the subject (or microbiome thereof) by at least 5%, 6%, 7%, 8%, 9%, 10%, 11%, 12%, 13%, 14%, 15%, 16%, 17%, 18%, 19%, 20%, 21%, 22%, 23%, 24%, 25%, 26%, 27%, 28%, 29%, 30%, 35%, 40%, 45%, 50%, 55%, 60%, 65%, 70%, 75%, 80%, 85%, 90%, 95%, 100%, 125%, 150% or more, as compared to the abundance of Porphyromonas canigingivalis in a subject (e.g., a reference subject) (or microbiome thereof) who did not receive the composition.

[0207] In some embodiments, administration of a composition results in a decrease in abundance of Tannerella forsythia in the subject (or microbiome thereof) by at least 1.1-fold, 1.2-fold, 1.3-fold, 1.4-fold, 1.5-fold, 2-fold, 3-fold, 4-fold, 5-fold, 6-fold, 7-fold, 8-fold, 9-fold, 10-fold, 20-fold, 30-fold, 40-fold, 50-fold, 100-fold, 1000-fold, 10⁴-fold, 10⁵-fold or more, as compared to the abundance of Tannerella forsythia in the subject (or microbiome thereof) prior to administering the composition. In some embodiments, administration of the composition results in a decrease in abundance of Tannerella forsythia in the subject (or microbiome thereof) by at least 1.1-fold, 1.2-fold, 1.3-fold, 1.4-fold, 1.5-fold, 2-fold, 3-fold, 4-fold, 5-fold, 6-fold, 7-fold, 8-fold, 9-fold, 10-fold, 20-fold, 30-fold, 40-fold, 50-fold, 100-fold, 1000-fold, 10⁴-fold, 10⁵-fold or more, as compared to the abundance of Tannerella forsythia in another subject (e.g., a reference subject) (or microbiome thereof) who did not receive the composition.

[0208] In some embodiments, administration results in a decrease in abundance of Tannerella forsythia in the subject (or microbiome thereof) by at least 5%, 6%, 7%, 8%, 9%, 10%, 11%, 12%, 13%, 14%, 15%, 16%, 17%, 18%, 19%, 20%, 21%, 22%, 23%, 24%, 25%, 26%, 27%, 28%, 29%, 30%, 35%, 40%, 45%, 50%, 55%, 60%, 65%, 70%, 75%, 80%, 85%, 90%, 95%, or 100%, as compared to the abundance of Tannerella forsythia in the subject (or microbiome thereof) prior to administering the composition. In some embodiments, administration of a composition results in decrease in the abundance of Tannerella forsythia in the subject (or microbiome thereof) by at least 5%, 6%, 7%, 8%, 9%, 10%, 11%, 12%, 13%, 14%, 15%, 16%, 17%, 18%, 19%, 20%, 21%, 22%, 23%, 24%, 25%, 26%, 27%, 28%, 29%, 30%, 35%, 40%, 45%, 50%, 55%, 60%, 65%, 70%, 75%, 80%, 85%, 90%, 95%, 100%, 125%, 150% or more, as compared to the abundance of Tannerella forsythia in a subject (e.g., a reference subject) (or microbiome thereof) who did not receive the composition.

[0209] In some embodiments, administration of a composition results in a decrease in abundance of Treponema denticola in the subject (or microbiome thereof) by at least 1.1-fold, 1.2-fold, 1.3-fold, 1.4-fold, 1.5-fold, 2-fold, 3-fold, 4-fold, 5-fold, 6-fold, 7-fold, 8-fold, 9-fold, 10-fold, 20-fold, 30-fold, 40-fold, 50-fold, 100-fold, 1000-fold, 10⁴-fold, 10⁵-fold or more, as compared to the abundance of Treponema denticola in the subject (or microbiome thereof) prior to administering the composition. In some embodiments, administration of the composition results in a decrease in abundance of Treponema denticola in the subject (or microbiome thereof) by at least 1.1-fold, 1.2-fold, 1.3-fold, 1.4-fold, 1.5-fold, 2-fold, 3-fold, 4-fold, 5-fold, 6-fold, 7-fold, 8-fold, 9-fold, 10-fold, 20-fold, 30-fold, 40-fold, 50-fold, 100-fold, 1000-fold, 10⁴-fold, 10⁵-fold or more, as compared to the abundance of Treponema denticola in another subject (e.g., a reference subject) (or microbiome thereof) who did not receive the composition.

[0210] In some embodiments, administration results in a decrease in abundance of Treponema denticola in the subject (or microbiome thereof) by at least 5%, 6%, 7%, 8%, 9%, 10%, 11%, 12%, 13%, 14%, 15%, 16%, 17%, 18%, 19%, 20%, 21%, 22%, 23%, 24%, 25%, 26%, 27%, 28%, 29%, 30%, 35%, 40%, 45%, 50%, 55%, 60%, 65%, 70%, 75%, 80%, 85%, 90%, 95%, or 100%, as compared to the abundance of Treponema denticola in the subject (or microbiome thereof) prior to administering the composition. In some embodiments, administration of a composition results in decrease in the abundance of Treponema denticola in the subject (or microbiome thereof) by at least 5%, 6%, 7%, 8%, 9%, 10%, 11%, 12%, 13%, 14%, 15%, 16%, 17%, 18%, 19%, 20%, 21%, 22%, 23%, 24%, 25%, 26%, 27%, 28%, 29%, 30%, 35%, 40%, 45%, 50%, 55%, 60%, 65%, 70%, 75%, 80%, 85%, 90%, 95%, 100%, 125%, 150% or more, as compared to the abundance of Treponema denticola in a subject (e.g., a reference subject) (or microbiome thereof) who did not receive the composition.

[0211] In some embodiments, administration of a composition results in a decrease in abundance of Fusobacterium nucleatum in the subject (or microbiome thereof) by at least 1.1-fold, 1.2-fold, 1.3-fold, 1.4-fold, 1.5-fold, 2-fold, 3-fold, 4-fold, 5-fold, 6-fold, 7-fold, 8-fold, 9-fold, 10-fold, 20-fold, 30-fold, 40-fold, 50-fold, 100-fold, 1000-fold, 10⁴-fold, 10⁵-fold or more, as compared to the abundance of Fusobacterium nucleatum in the subject (or microbiome thereof) prior to administering the composition. In some embodiments, administration of the composition results in a decrease in abundance of Fusobacterium nucleatum in the subject (or microbiome thereof) by at least 1.1-fold, 1.2-fold, 1.3-fold, 1.4-fold, 1.5-fold, 2-fold, 3-fold, 4-fold, 5-fold, 6-fold, 7-fold, 8-fold, 9-fold, 10-fold, 20-fold, 30-fold, 40-fold, 50-fold, 100-fold, 1000-fold, 10⁴-fold, 10⁵-fold or more, as compared to the abundance of Fusobacterium nucleatum in another subject (e.g., a reference subject) (or microbiome thereof) who did not receive the composition.

[0212] In some embodiments, administration results in a decrease in abundance of Fusobacterium nucleatum in the subject (or microbiome thereof) by at least 5%, 6%, 7%, 8%, 9%, 10%, 11%, 12%, 13%, 14%, 15%, 16%, 17%, 18%, 19%, 20%, 21%, 22%, 23%, 24%, 25%, 26%, 27%, 28%, 29%, 30%, 35%, 40%, 45%, 50%, 55%, 60%, 65%, 70%, 75%, 80%, 85%, 90%, 95%, or 100%, as compared to the abundance of Fusobacterium nucleatum in the subject (or microbiome thereof) prior to administering the composition. In some embodiments, administration of a composition results in decrease in the abundance of Fusobacterium nucleatum in the subject (or microbiome thereof) by at least 5%, 6%, 7%, 8%, 9%, 10%, 11%, 12%, 13%, 14%, 15%, 16%, 17%, 18%, 19%, 20%, 21%, 22%, 23%, 24%, 25%, 26%, 27%, 28%, 29%, 30%, 35%, 40%, 45%, 50%, 55%, 60%, 65%, 70%, 75%, 80%, 85%, 90%, 95%, 100%, 125%, 150% or more, as compared to the abundance of Fusobacterium nucleatum in a subject (e.g., a reference subject) (or microbiome thereof) who did not receive the composition.

[0213] In some embodiments, administration of a composition results in a decrease in abundance of Neisseria canis in the subject (or microbiome thereof) by at least 1.1-fold, 1.2-fold, 1.3-fold, 1.4-fold, 1.5-fold, 2-fold, 3-fold, 4-fold, 5-fold, 6-fold, 7-fold, 8-fold, 9-fold, 10-fold, 20-fold, 30-fold, 40-fold, 50-fold, 100-fold, 1000-fold, 10⁴-fold, 10⁵-fold or more, as compared to the abundance of Neisseria canis in the subject (or microbiome thereof) prior to administering the composition. In some embodiments, administration of the composition results in a decrease in abundance of Neisseria canis in the subject (or microbiome thereof) by at least 1.1-fold, 1.2-fold, 1.3-fold, 1.4-fold, 1.5-fold, 2-fold, 3-fold, 4-fold, 5-fold, 6-fold, 7-fold, 8-fold, 9-fold, 10-fold, 20-fold, 30-fold, 40-fold, 50-fold, 100-fold, 1000-fold, 10⁴-fold, 10⁵-fold or more, as compared to the abundance of Neisseria canis in another subject (e.g., a reference subject) (or microbiome thereof) who did not receive the composition.

[0214] In some embodiments, administration results in a decrease in abundance of Neisseria canis in the subject (or microbiome thereof) by at least 5%, 6%, 7%, 8%, 9%, 10%, 11%, 12%, 13%, 14%, 15%, 16%, 17%, 18%, 19%, 20%, 21%, 22%, 23%, 24%, 25%, 26%, 27%, 28%, 29%, 30%, 35%, 40%, 45%, 50%, 55%, 60%, 65%, 70%, 75%, 80%, 85%, 90%, 95%, or 100%, as compared to the abundance of Neisseria canis in the subject (or microbiome thereof) prior to administering the composition. In some embodiments, administration of a composition results in decrease in the abundance of Neisseria canis in the subject (or microbiome thereof) by at least 5%, 6%, 7%, 8%, 9%, 10%, 11%, 12%, 13%, 14%, 15%, 16%, 17%, 18%, 19%, 20%, 21%, 22%, 23%, 24%, 25%, 26%, 27%, 28%, 29%, 30%, 35%, 40%, 45%, 50%, 55%, 60%, 65%, 70%, 75%, 80%, 85%, 90%, 95%, 100%, 125%, 150% or more, as compared to the abundance of Neisseria canis in a subject (e.g., a reference subject) (or microbiome thereof) who did not receive the composition.

[0215] In some embodiments, administration of a composition results in a decrease in abundance of Bergeyella zoohelcum in the subject (or microbiome thereof) by at least 1.1-fold, 1.2-fold, 1.3-fold, 1.4-fold, 1.5-fold, 2-fold, 3-fold, 4-fold, 5-fold, 6-fold, 7-fold, 8-fold, 9-fold, 10-fold, 20-fold, 30-fold, 40-fold, 50-fold, 100-fold, 1000-fold, 10⁴-fold, 10⁵-fold or more, as compared to the abundance of Bergeyella zoohelcum in the subject (or microbiome thereof) prior to administering the composition. In some embodiments, administration of the composition results in a decrease in abundance of Bergeyella zoohelcum in the subject (or microbiome thereof) by at least 1.1-fold, 1.2-fold, 1.3-fold, 1.4-fold, 1.5-fold, 2-fold, 3-fold, 4-fold, 5-fold, 6-fold, 7-fold, 8-fold, 9-fold, 10-fold, 20-fold, 30-fold, 40-fold, 50-fold, 100-fold, 1000-fold, 10⁴-fold, 10⁵-fold or more, as compared to the abundance of Bergeyella zoohelcum in another subject (e.g., a reference subject) (or microbiome thereof) who did not receive the composition.

[0216] In some embodiments, administration results in a decrease in abundance of Bergeyella zoohelcum in the subject (or microbiome thereof) by at least 5%, 6%, 7%, 8%, 9%, 10%, 11%, 12%, 13%, 14%, 15%, 16%, 17%, 18%, 19%, 20%, 21%, 22%, 23%, 24%, 25%, 26%, 27%, 28%, 29%, 30%, 35%, 40%, 45%, 50%, 55%, 60%, 65%, 70%, 75%, 80%, 85%, 90%, 95%, or 100%, as compared to the abundance of Bergeyella zoohelcum in the subject (or microbiome thereof) prior to administering the composition. In some embodiments, administration of a composition results in decrease in the abundance of Bergeyella zoohelcum in the subject (or microbiome thereof) by at least 5%, 6%, 7%, 8%, 9%, 10%, 11%, 12%, 13%, 14%, 15%, 16%, 17%, 18%, 19%, 20%, 21%, 22%, 23%, 24%, 25%, 26%, 27%, 28%, 29%, 30%, 35%, 40%, 45%, 50%, 55%, 60%, 65%, 70%, 75%, 80%, 85%, 90%, 95%, 100%, 125%, 150% or more, as compared to the abundance of Bergeyella zoohelcum in a subject (e.g., a reference subject) (or microbiome thereof) who did not receive the composition.

[0217] In some embodiments, administration reduces the concentration of 1, 2, 3, 4, 5, 6, 7, 8, 9, 10, 11, 12, 13, 14, 15, 16, 17, 18, 19, or 20 VSCs with distinct structures in the oral microenvironment of the subject. In some embodiments, administration reduces the concentration of 1, 2, or 3 VSCs with distinct structures. In some embodiments, administration reduces the concentration of hydrogen sulfide. In some embodiments, administration reduces the concentration of methyl mercaptan. In some embodiments, administration reduces the concentration of dimethyl sulfide.

[0218] In some embodiments, administration reduces the concentration of VSCs in an oral microenvironment by at least 5%, at least 10%, at least 15%, at least 20%, at least 25%, at least 30%, at least 35%, at least 40%, at least 45%, at least 50%, at least 55%, at least 60%, at least 65%, at least 70%, at least 75%, at least 80%, at least 85%, at least 90% or at least 95%. In some embodiments, administration reduces the concentration of VSCs by 5-10%, 10-20%, 20-30%, 30-40%, 40-50%, 50-60%, 60-70%, 70-80%, 80-90%, or 90-100%. In some embodiments, administration reduces the concentration of VSCs by 5-95%, 5-90%, 5-80%, 5-70%, 5-60%, 5-50%, 5-40%, 5-30%, 5-25%, 5-20%, 5-15%, or 5-10%. In some embodiments, administration reduces the concentration of VSCs by 5-99%, 10-99%, 15-99%, 20-99%, 25-99%, 30-99%, 40-99%, 50-99%, 60-99%, 70-99%, 80-99%, or 90-99%.

[0219] In some embodiments, administration reduces the concentration of hydrogen sulfide in an oral microenvironment by at least 5%, at least 10%, at least 15%, at least 20%, at least 25%, at least 30%, at least 35%, at least 40%, at least 45%, at least 50%, at least 55%, at least 60%, at least 65%, at least 70%, at least 75%, at least 80%, at least 85%, at least 90% or at least 95%. In some embodiments, administration reduces the concentration of hydrogen sulfide by 5-10%, 10-20%, 20-30%, 30-40%, 40-50%, 50-60%, 60-70%, 70-80%, 80-90%, or 90-100%. In some embodiments, administration reduces the concentration of hydrogen sulfide by 5-95%, 5-90%, 5-80%, 5-70%, 5-60%, 5-50%, 5-40%, 5-30%, 5-25%, 5-20%, 5-15%, or 5-10%. In some embodiments, administration reduces the concentration of hydrogen sulfide by 5-99%, 10-99%, 15-99%, 20-99%, 25-99%, 30-99%, 40-99%, 50-99%, 60-99%, 70-99%, 80-99%, or 90-99%.

[0220] In some embodiments, administration reduces the concentration of methyl mercaptan in an oral microenvironment by at least 5%, at least 10%, at least 15%, at least 20%, at least 25%, at least 30%, at least 35%, at least 40%, at least 45%, at least 50%, at least 55%, at least 60%, at least 65%, at least 70%, at least 75%, at least 80%, at least 85%, at least 90% or at least 95%. In some embodiments, administration reduces the concentration of methyl mercaptan by 5-10%, 10-20%, 20-30%, 30-40%, 40-50%, 50-60%, 60-70%, 70-80%, 80-90%, or 90-100%. In some embodiments, administration reduces the concentration of methyl mercaptan by 5-95%, 5-90%, 5-80%, 5-70%, 5-60%, 5-50%, 5-40%, 5-30%, 5-25%, 5-20%, 5-15%, or 5-10%. In some embodiments, administration reduces the concentration of methyl mercaptan by 5-99%, 10-99%, 15-99%, 20-99%, 25-99%, 30-99%, 40-99%, 50-99%, 60-99%, 70-99%, 80-99%, or 90-99%.

[0221] In some embodiments, administration reduces the concentration of dimethyl sulfide in an oral microenvironment by at least 5%, at least 10%, at least 15%, at least 20%, at least 25%, at least 30%, at least 35%, at least 40%, at least 45%, at least 50%, at least 55%, at least 60%, at least 65%, at least 70%, at least 75%, at least 80%, at least 85%, at least 90% or at least 95%. In some embodiments, administration reduces the concentration of dimethyl sulfide by 5-10%, 10-20%, 20-30%, 30-40%, 40-50%, 50-60%, 60-70%, 70-80%, 80-90%, or 90-100%. In some embodiments, administration reduces the concentration of dimethyl sulfide by 5-95%, 5-90%, 5-80%, 5-70%, 5-60%, 5-50%, 5-40%, 5-30%, 5-25%, 5-20%, 5-15%, or 5-10%. In some embodiments, administration reduces the concentration of dimethyl sulfide by 5-99%, 10-99%, 15-99%, 20-99%, 25-99%, 30-99%, 40-99%, 50-99%, 60-99%, 70-99%, 80-99%, or 90-99%.

[0222] The extent to which a composition or nutritional supplement treats or prevents a symptom may be evaluated using methods known in the art, such as monitoring the change in the frequency, occurrence, and/or severity of symptoms following administration of the composition or nutritional supplement. Additionally, groups of subjects administered the bacterial mixture, composition, or nutritional supplement may be monitored and compared to another group of subjects that was not administered the composition or nutritional supplement, a group that was administered a different amount of the composition or nutritional supplement, and/or a group that was administered a control composition (e.g., a carrier or excipient lacking the fermentate(s)).

Reduction of Volatile Sulfur Compounds (VSCs) Abundance and/or Inhibition of VSC Production

[0223] Fermentates of bacterial strains for use in the compositions described herein were identified based on the ability to reduce the abundance of volatile sulfur compounds (VSCs) in an environment and/or inhibit the production of VSCs by other microorganisms in the environment. VSCs are associated with the unpleasant odor of breath of subjects with halitosis, and reduction in VSC abundance (e.g., by VSC metabolism or inhibition of VSC production) is expected to alleviate this symptom of halitosis. Non-limiting examples of such VSCs include hydrogen sulfide, methyl mercaptan, and dimethyl sulfide, all of which give off strong and unpleasant odors.

[0224] In some embodiments, a composition, nutritional supplement, dental supplement, food product, and/or oral care product reduces the abundance of one or more microorganisms associated with halitosis in the subject or the subject's oral microenvironment. In some embodiments, a composition, nutritional supplement, dental supplement, food product, and/or oral care product alleviates one or more signs and symptoms of halitosis in a subject. Signs and symptoms of halitosis include unpleasant breath containing one or more volatile sulfur compounds, gingivitis, and accumulation of plaque, tartar, and/or dental calculus on teeth of the subject.

[0225] In some embodiments, a composition comprising a fermentate (and/or a nutritional supplement, dental supplement, food product, and/or oral care product comprising the same) reduces the concentration of 1, 2, 3, 4, 5, 6, 7, 8, 9, 10, 11, 12, 13, 14, 15, 16, 17, 18, 19, or 20 VSCs with distinct structures. In some embodiments, the composition reduces the concentration of 1, 2, or 3 VSCs with distinct structures. In some embodiments, the composition reduces the concentration of hydrogen sulfide. In some embodiments, the composition reduces the concentration of methyl mercaptan. In some embodiments, the composition reduces the concentration of dimethyl sulfide.

[0226] In some embodiments, the composition reduces the concentration of VSCs by at least 5%, at least 10%, at least 15%, at least 20%, at least 25%, at least 30%, at least 35%, at least 40%, at least 45%, at least 50%, at least 55%, at least 60%, at least 65%, at least 70%, at least 75%, at least 80%, at least 85%, at least 90% or at least 95%. In some embodiments, the composition reduces the concentration of VSCs by 5-10%, 10-20%, 20-30%, 30-40%, 40-50%, 50-60%, 60-70%, 70-80%, 80-90%, or 90-100%. In some embodiments, the composition reduces the concentration of VSCs by 5-95%, 5-90%, 5-80%, 5-70%, 5-60%, 5-50%, 5-40%, 5-30%, 5-25%, 5-20%, 5-15%, or 5-10%. In some embodiments, the composition reduces the concentration of VSCs by 5-99%, 10-99%, 15-99%, 20-99%, 25-99%, 30-99%, 40-99%, 50-99%, 60-99%, 70-99%, 80-99%, or 90-99%.

[0227] In some embodiments, the composition reduces the concentration of hydrogen sulfide by at least 5%, at least 10%, at least 15%, at least 20%, at least 25%, at least 30%, at least 35%, at least 40%, at least 45%, at least 50%, at least 55%, at least 60%, at least 65%, at least 70%, at least 75%, at least 80%, at least 85%, at least 90% or at least 95%. In some embodiments, the composition reduces the concentration of hydrogen sulfide by 5-10%, 10-20%, 20-30%, 30-40%, 40-50%, 50-60%, 60-70%, 70-80%, 80-90%, or 90-100%. In some embodiments, the composition reduces the concentration of hydrogen sulfide by 5-95%, 5-90%, 5-80%, 5-70%, 5-60%, 5-50%, 5-40%, 5-30%, 5-25%, 5-20%, 5-15%, or 5-10%. In some embodiments, the composition reduces the concentration of hydrogen sulfide by 5-99%, 10-99%, 15-99%, 20-99%, 25-99%, 30-99%, 40-99%, 50-99%, 60-99%, 70-99%, 80-99%, or 90-99%.

[0228] In some embodiments, the composition reduces the concentration of methyl mercaptan by at least 5%, at least 10%, at least 15%, at least 20%, at least 25%, at least 30%, at least 35%, at least 40%, at least 45%, at least 50%, at least 55%, at least 60%, at least 65%, at least 70%, at least 75%, at least 80%, at least 85%, at least 90% or at least 95%. In some embodiments, the composition reduces the concentration of methyl mercaptan by 5-10%, 10-20%, 20-30%, 30-40%, 40-50%, 50-60%, 60-70%, 70-80%, 80-90%, or 90-100%. In some embodiments, the composition reduces the concentration of methyl mercaptan by 5-95%, 5-90%, 5-80%, 5-70%, 5-60%, 5-50%, 5-40%, 5-30%, 5-25%, 5-20%, 5-15%, or 5-10%. In some embodiments, the composition reduces the concentration of methyl mercaptan by 5-99%, 10-99%, 15-99%, 20-99%, 25-99%, 30-99%, 40-99%, 50-99%, 60-99%, 70-99%, 80-99%, or 90-99%.

[0229] In some embodiments, the composition reduces the concentration of dimethyl sulfide by at least 5%, at least 10%, at least 15%, at least 20%, at least 25%, at least 30%, at least 35%, at least 40%, at least 45%, at least 50%, at least 55%, at least 60%, at least 65%, at least 70%, at least 75%, at least 80%, at least 85%, at least 90% or at least 95%. In some embodiments, the composition reduces the concentration of dimethyl sulfide by 5-10%, 10-20%, 20-30%, 30-40%, 40-50%, 50-60%, 60-70%, 70-80%, 80-90%, or 90-100%. In some embodiments, the composition reduces the concentration of dimethyl sulfide by 5-95%, 5-90%, 5-80%, 5-70%, 5-60%, 5-50%, 5-40%, 5-30%, 5-25%, 5-20%, 5-15%, or 5-10%. In some embodiments, the composition reduces the concentration of dimethyl sulfide by 5-99%, 10-99%, 15-99%, 20-99%, 25-99%, 30-99%, 40-99%, 50-99%, 60-99%, 70-99%, 80-99%, or 90-99%.

[0230] Not all fermentates must reduce, or be produced by bacterial strains that reduce, the concentration of VSCs. Some bacterial strains and fermentates thereof may (i) produce one or more antioxidants; (ii) enhance the ability of other bacterial strains or fermentates thereof to reduce VSC concentration; (iii) inhibit VSC production by other microorganisms; and/or (iv) disrupt a biofilm of one or more oral microbes.

[0231] In some embodiments, a composition comprises one or more antioxidants. In some embodiments a fermentate comprises one or more antioxidants. In some embodiments, a fermentate is produced by a bacterial strain that produces one or more antioxidants.

[0232] In some embodiments, a composition comprises one or more organic acids. In some embodiments a fermentate comprises one or more organic acids. In some embodiments, a fermentate is produced by a bacterial strain that produces one or more organic acids. Non-limiting examples of organic acids include lactic acid, ascorbic acid, acetic acid, acrylic acid, propionic acid, pyruvic acid, and citric acid.

[0233] In some embodiments, a composition enhances the ability of one or more other fermentates to reduce the concentration of VSCs. In some embodiments, a fermentate enhances the ability of one or more other fermentates to reduce the concentration of VSCs. In some embodiments, a fermentate is produced by a bacterial strain that enhances the ability of one or more other fermentates or bacterial strains to reduce the concentration of VSCs.

[0234] In some embodiments, a composition inhibits VSC production by another microorganism. In some embodiments, a fermentate inhibits VSC production by another microorganism. In some embodiments, a fermentate is produced by a bacterial strain that inhibits VSC production by another microorganism. In some embodiments, VSC production by Porphyromonas gingivalis is inhibited. In some embodiments, VSC production by Prevotella intermedia is inhibited. In some embodiments, VSC production by Porphyromonas canigingivalis is inhibited. In some embodiments, VSC production by Tannerella forsythia is inhibited. In some embodiments, VSC production by Treponema denticola is inhibited. In some embodiments, VSC production by Fusobacterium nucleatum is inhibited. In some embodiments, VSC production by Neisseria canis is inhibited. In some embodiments, VSC production by Bergeyella zoohelcum is inhibited.

[0235] In some embodiments, a composition inhibits hydrogen sulfide production by another microorganism. In some embodiments, a fermentate inhibits hydrogen sulfide production by another microorganism. In some embodiments, a fermentate is produced by a bacterial strain that inhibits hydrogen sulfide production by another microorganism. In some embodiments, hydrogen sulfide production by Porphyromonas gingivalis is inhibited. In some embodiments, hydrogen sulfide production by Prevotella intermedia is inhibited. In some embodiments, hydrogen sulfide production by Porphyromonas canigingivalis is inhibited. In some embodiments, hydrogen sulfide production by Tannerella forsythia is inhibited. In some embodiments, hydrogen sulfide production by Treponema denticola is inhibited. In some embodiments, hydrogen sulfide production by Fusobacterium nucleatum is inhibited. In some embodiments, hydrogen sulfide production by Neisseria canis is inhibited. In some embodiments, hydrogen sulfide production by Bergeyella zoohelcum is inhibited.

[0236] In some embodiments, a composition inhibits methyl mercaptan production by another microorganism. In some embodiments, a fermentate inhibits methyl mercaptan production by another microorganism. In some embodiments, a fermentate is produced by a bacterial strain that inhibits methyl mercaptan production by another microorganism. In some embodiments, methyl mercaptan production by Porphyromonas gingivalis is inhibited. In some embodiments, methyl mercaptan production by Prevotella intermedia is inhibited. In some embodiments, methyl mercaptan production by Porphyromonas canigingivalis is inhibited. In some embodiments, methyl mercaptan production by Tannerella forsythia is inhibited. In some embodiments, methyl mercaptan production by Treponema denticola is inhibited. In some embodiments, methyl mercaptan production by Fusobacterium nucleatum is inhibited. In some embodiments, methyl mercaptan production by Neisseria canis is inhibited. In some embodiments, methyl mercaptan production by Bergeyella zoohelcum is inhibited.

[0237] In some embodiments, a composition inhibits dimethyl sulfide production by another microorganism. In some embodiments, a fermentate inhibits dimethyl sulfide production by another microorganism. In some embodiments, a fermentate is produced by a bacterial strain that inhibits dimethyl sulfide production by another microorganism. In some embodiments, dimethyl sulfide production by Porphyromonas gingivalis is inhibited. In some embodiments, dimethyl sulfide production by Prevotella intermedia is inhibited. In some embodiments, dimethyl sulfide production by Porphyromonas canigingivalis is inhibited. In some embodiments, dimethyl sulfide production by Tannerella forsythia is inhibited. In some embodiments, dimethyl sulfide production by Treponema denticola is inhibited. In some embodiments, dimethyl sulfide production by Fusobacterium nucleatum is inhibited. In some embodiments, dimethyl sulfide production by Neisseria canis is inhibited. In some embodiments, dimethyl sulfide production by Bergeyella zoohelcum is inhibited.

[0238] In some embodiments, a composition reduces the abundance in an oral cavity of a subject of one or more microorganisms that produce VSCs. In some embodiments, a fermentate reduces the abundance in an oral cavity of a subject of one or more microorganisms that produce VSCs. In some embodiments, a fermentate is produced by a bacterial strain that reduces the abundance in an oral cavity of a subject of one or more microorganisms that produce VSCs. In some embodiments, the abundance of Porphyromonas gingivalis is reduced. In some embodiments, the abundance of Prevotella intermedia is reduced. In some embodiments, the abundance of Porphyromonas canigingivalis is reduced. In some embodiments, the abundance of Tannerella forsythia is reduced. In some embodiments, the abundance of Treponema denticola is reduced. In some embodiments, the abundance of Fusobacterium nucleatum is reduced. In some embodiments, the abundance of Neisseria canis is reduced. In some embodiments, the abundance of Bergeyella zoohelcum is reduced.

[0239] In some embodiments, the abundance of Porphyromonas gingivalis in the oral cavity (or microbiome thereof) is reduced by at least 1.1-fold, 1.2-fold, 1.3-fold, 1.4-fold, 1.5-fold, 2-fold, 3-fold, 4-fold, 5-fold, 6-fold, 7-fold, 8-fold, 9-fold, 10-fold, 20-fold, 30-fold, 40-fold, 50-fold, 100-fold, 1000-fold, 10⁴-fold, 10⁵-fold or more, as compared to the abundance of Porphyromonas gingivalis in the oral cavity (or microbiome thereof) prior to exposure to the composition or fermentate(s). In some embodiments, the abundance of Porphyromonas gingivalis in the oral cavity (or microbiome thereof) is reduced by at least by at least 5%, 6%, 7%, 8%, 9%, 10%, 11%, 12%, 13%, 14%, 15%, 16%, 17%, 18%, 19%, 20%, 21%, 22%, 23%, 24%, 25%, 26%, 27%, 28%, 29%, 30%, 35%, 40%, 45%, 50%, 55%, 60%, 65%, 70%, 75%, 80%, 85%, 90%, 95%, or 100%, as compared to the abundance of Porphyromonas gingivalis in the oral cavity (or microbiome thereof) prior to exposure to the composition or fermentate(s).

[0240] In some embodiments, the abundance of Prevotella intermedia in the oral cavity (or microbiome thereof) is reduced by at least 1.1-fold, 1.2-fold, 1.3-fold, 1.4-fold, 1.5-fold, 2-fold, 3-fold, 4-fold, 5-fold, 6-fold, 7-fold, 8-fold, 9-fold, 10-fold, 20-fold, 30-fold, 40-fold, 50-fold, 100-fold, 1000-fold, 10⁴-fold, 10⁵-fold or more, as compared to the abundance of Prevotella intermedia in the oral cavity (or microbiome thereof) prior to exposure to the composition or fermentate(s). In some embodiments, the abundance of Prevotella intermedia in the oral cavity (or microbiome thereof) is reduced by at least by at least 5%, 6%, 7%, 8%, 9%, 10%, 11%, 12%, 13%, 14%, 15%, 16%, 17%, 18%, 19%, 20%, 21%, 22%, 23%, 24%, 25%, 26%, 27%, 28%, 29%, 30%, 35%, 40%, 45%, 50%, 55%, 60%, 65%, 70%, 75%, 80%, 85%, 90%, 95%, or 100%, as compared to the abundance of Prevotella intermedia in the oral cavity (or microbiome thereof) prior to exposure to the composition or fermentate(s).

[0241] In some embodiments, the abundance of Porphyromonas canigingivalis in the oral cavity (or microbiome thereof) is reduced by at least 1.1-fold, 1.2-fold, 1.3-fold, 1.4-fold, 1.5-fold, 2-fold, 3-fold, 4-fold, 5-fold, 6-fold, 7-fold, 8-fold, 9-fold, 10-fold, 20-fold, 30-fold, 40-fold, 50-fold, 100-fold, 1000-fold, 10⁴-fold, 10⁵-fold or more, as compared to the abundance of Porphyromonas canigingivalis in the oral cavity (or microbiome thereof) prior to exposure to the composition or fermentate(s). In some embodiments, the abundance of Porphyromonas canigingivalis in the oral cavity (or microbiome thereof) is reduced by at least by at least 5%, 6%, 7%, 8%, 9%, 10%, 11%, 12%, 13%, 14%, 15%, 16%, 17%, 18%, 19%, 20%, 21%, 22%, 23%, 24%, 25%, 26%, 27%, 28%, 29%, 30%, 35%, 40%, 45%, 50%, 55%, 60%, 65%, 70%, 75%, 80%, 85%, 90%, 95%, or 100%, as compared to the abundance of Porphyromonas canigingivalis in the oral cavity (or microbiome thereof) prior to exposure to the composition or fermentate(s).

[0242] In some embodiments, the abundance of Tannerella forsythia in the oral cavity (or microbiome thereof) is reduced by at least 1.1-fold, 1.2-fold, 1.3-fold, 1.4-fold, 1.5-fold, 2-fold, 3-fold, 4-fold, 5-fold, 6-fold, 7-fold, 8-fold, 9-fold, 10-fold, 20-fold, 30-fold, 40-fold, 50-fold, 100-fold, 1000-fold, 10⁴-fold, 10⁵-fold or more, as compared to the abundance of Tannerella forsythia in the oral cavity (or microbiome thereof) prior to exposure to the composition or fermentate(s). In some embodiments, the abundance of Tannerella forsythia in the oral cavity (or microbiome thereof) is reduced by at least by at least 5%, 6%, 7%, 8%, 9%, 10%, 11%, 12%, 13%, 14%, 15%, 16%, 17%, 18%, 19%, 20%, 21%, 22%, 23%, 24%, 25%, 26%, 27%, 28%, 29%, 30%, 35%, 40%, 45%, 50%, 55%, 60%, 65%, 70%, 75%, 80%, 85%, 90%, 95%, or 100%, as compared to the abundance of Tannerella forsythia in the oral cavity (or microbiome thereof) prior to exposure to the composition or fermentate(s).

[0243] In some embodiments, the abundance of Treponema denticola in the oral cavity (or microbiome thereof) is reduced by at least 1.1-fold, 1.2-fold, 1.3-fold, 1.4-fold, 1.5-fold, 2-fold, 3-fold, 4-fold, 5-fold, 6-fold, 7-fold, 8-fold, 9-fold, 10-fold, 20-fold, 30-fold, 40-fold, 50-fold, 100-fold, 1000-fold, 10⁴-fold, 10⁵-fold or more, as compared to the abundance of Treponema denticola in the oral cavity (or microbiome thereof) prior to exposure to the composition or fermentate(s). In some embodiments, the abundance of Treponema denticola in the oral cavity (or microbiome thereof) is reduced by at least by at least 5%, 6%, 7%, 8%, 9%, 10%, 11%, 12%, 13%, 14%, 15%, 16%, 17%, 18%, 19%, 20%, 21%, 22%, 23%, 24%, 25%, 26%, 27%, 28%, 29%, 30%, 35%, 40%, 45%, 50%, 55%, 60%, 65%, 70%, 75%, 80%, 85%, 90%, 95%, or 100%, as compared to the abundance of Treponema denticola in the oral cavity (or microbiome thereof) prior to exposure to the composition or fermentate(s).

[0244] In some embodiments, the abundance of Fusobacterium nucleatum in the oral cavity (or microbiome thereof) is reduced by at least 1.1-fold, 1.2-fold, 1.3-fold, 1.4-fold, 1.5-fold, 2-fold, 3-fold, 4-fold, 5-fold, 6-fold, 7-fold, 8-fold, 9-fold, 10-fold, 20-fold, 30-fold, 40-fold, 50-fold, 100-fold, 1000-fold, 10⁴-fold, 10⁵-fold or more, as compared to the abundance of Fusobacterium nucleatum in the oral cavity (or microbiome thereof) prior to exposure to the composition or fermentate(s). In some embodiments, the abundance of Fusobacterium nucleatum in the oral cavity (or microbiome thereof) is reduced by at least by at least 5%, 6%, 7%, 8%, 9%, 10%, 11%, 12%, 13%, 14%, 15%, 16%, 17%, 18%, 19%, 20%, 21%, 22%, 23%, 24%, 25%, 26%, 27%, 28%, 29%, 30%, 35%, 40%, 45%, 50%, 55%, 60%, 65%, 70%, 75%, 80%, 85%, 90%, 95%, or 100%, as compared to the abundance of Fusobacterium nucleatum in the oral cavity (or microbiome thereof) prior to exposure to the composition or fermentate(s).

[0245] In some embodiments, the abundance of Neisseria canis in the oral cavity (or microbiome thereof) is reduced by at least 1.1-fold, 1.2-fold, 1.3-fold, 1.4-fold, 1.5-fold, 2-fold, 3-fold, 4-fold, 5-fold, 6-fold, 7-fold, 8-fold, 9-fold, 10-fold, 20-fold, 30-fold, 40-fold, 50-fold, 100-fold, 1000-fold, 10⁴-fold, 10⁵-fold or more, as compared to the abundance of Neisseria canis in the oral cavity (or microbiome thereof) prior to exposure to the composition or fermentate(s). In some embodiments, the abundance of Neisseria canis in the oral cavity (or microbiome thereof) is reduced by at least by at least 5%, 6%, 7%, 8%, 9%, 10%, 11%, 12%, 13%, 14%, 15%, 16%, 17%, 18%, 19%, 20%, 21%, 22%, 23%, 24%, 25%, 26%, 27%, 28%, 29%, 30%, 35%, 40%, 45%, 50%, 55%, 60%, 65%, 70%, 75%, 80%, 85%, 90%, 95%, or 100%, as compared to the abundance of Neisseria canis in the oral cavity (or microbiome thereof) prior to exposure to the composition or fermentate(s).

[0246] In some embodiments, the abundance of Bergeyella zoohelcum in the oral cavity (or microbiome thereof) is reduced by at least 1.1-fold, 1.2-fold, 1.3-fold, 1.4-fold, 1.5-fold, 2-fold, 3-fold, 4-fold, 5-fold, 6-fold, 7-fold, 8-fold, 9-fold, 10-fold, 20-fold, 30-fold, 40-fold, 50-fold, 100-fold, 1000-fold, 10⁴-fold, 10⁵-fold or more, as compared to the abundance of Bergeyella zoohelcum in the oral cavity (or microbiome thereof) prior to exposure to the composition or fermentate(s). In some embodiments, the abundance of Bergeyella zoohelcum in the oral cavity (or microbiome thereof) is reduced by at least by at least 5%, 6%, 7%, 8%, 9%, 10%, 11%, 12%, 13%, 14%, 15%, 16%, 17%, 18%, 19%, 20%, 21%, 22%, 23%, 24%, 25%, 26%, 27%, 28%, 29%, 30%, 35%, 40%, 45%, 50%, 55%, 60%, 65%, 70%, 75%, 80%, 85%, 90%, 95%, or 100%, as compared to the abundance of Bergeyella zoohelcum in the oral cavity (or microbiome thereof) prior to exposure to the composition or fermentate(s).

[0247] In some embodiments, a composition reduces the level of gum inflammation in a subject. In some embodiments, a fermentate reduces the level of gum inflammation in a subject. In some embodiments, a fermentate is produced by a bacterial strain that reduces the level of gum inflammation in a subject. In some embodiments, the level of gum inflammation is reduced by at least 5%, 6%, 7%, 8%, 9%, 10%, 11%, 12%, 13%, 14%, 15%, 16%, 17%, 18%, 19%, 20%, 21%, 22%, 23%, 24%, 25%, 26%, 27%, 28%, 29%, 30%, 35%, 40%, 45%, 50%, 55%, 60%, 65%, 70%, 75%, 80%, 85%, 90%, 95%, or 100%, as compared to the level of gum inflammation in the oral cavity prior to exposure to the composition or fermentate.

[0248] In some embodiments, a composition reduces the level of gingivitis in an oral cavity of a subject. In some embodiments, a fermentate reduces the level of gingivitis in an oral cavity of a subject. In some embodiments, a fermentate is produced by a bacterial strain that reduces the level of gingivitis in an oral cavity of a subject. In some embodiments, the level of gingivitis is reduced by at least 5%, 6%, 7%, 8%, 9%, 10%, 11%, 12%, 13%, 14%, 15%, 16%, 17%, 18%, 19%, 20%, 21%, 22%, 23%, 24%, 25%, 26%, 27%, 28%, 29%, 30%, 35%, 40%, 45%, 50%, 55%, 60%, 65%, 70%, 75%, 80%, 85%, 90%, 95%, or 100%, as compared to the level of gingivitis in the oral cavity prior to exposure to the composition or fermentate.

[0249] In some embodiments, a composition reduces the level of plaque in an oral cavity of a subject. In some embodiments, a fermentate reduces the level of plaque in an oral cavity of a subject. In some embodiments, a fermentate is produced by a bacterial strain that reduces the level of plaque in an oral cavity of a subject. In some embodiments, the level of plaque is reduced by at least 5%, 6%, 7%, 8%, 9%, 10%, 11%, 12%, 13%, 14%, 15%, 16%, 17%, 18%, 19%, 20%, 21%, 22%, 23%, 24%, 25%, 26%, 27%, 28%, 29%, 30%, 35%, 40%, 45%, 50%, 55%, 60%, 65%, 70%, 75%, 80%, 85%, 90%, 95%, or 100%, as compared to the level of plaque in the oral cavity prior to exposure to the composition or fermentate.

[0250] In some embodiments, a composition reduces the level of tartar in an oral cavity of a subject. In some embodiments, a fermentate reduces the level of tartar in an oral cavity of a subject. In some embodiments, a fermentate is produced by a bacterial strain that reduces the level of tartar in an oral cavity of a subject. In some embodiments, the level of tartar is reduced by at least 5%, 6%, 7%, 8%, 9%, 10%, 11%, 12%, 13%, 14%, 15%, 16%, 17%, 18%, 19%, 20%, 21%, 22%, 23%, 24%, 25%, 26%, 27%, 28%, 29%, 30%, 35%, 40%, 45%, 50%, 55%, 60%, 65%, 70%, 75%, 80%, 85%, 90%, 95%, or 100%, as compared to the level of tartar in the oral cavity prior to exposure to the composition or fermentate.

[0251] In some embodiments, a composition reduces the level of dental calculus accumulation in an oral cavity of a subject. In some embodiments, a fermentate reduces the level of dental calculus accumulation in an oral cavity of a subject. In some embodiments, a fermentate is produced by a bacterial strain that reduces the level of dental calculus accumulation in an oral cavity of a subject. In some embodiments, the level of dental calculus accumulation is reduced by at least 5%, 6%, 7%, 8%, 9%, 10%, 11%, 12%, 13%, 14%, 15%, 16%, 17%, 18%, 19%, 20%, 21%, 22%, 23%, 24%, 25%, 26%, 27%, 28%, 29%, 30%, 35%, 40%, 45%, 50%, 55%, 60%, 65%, 70%, 75%, 80%, 85%, 90%, 95%, or 100%, as compared to the level of dental calculus accumulation in the oral cavity prior to exposure to the composition or fermentate.

[0252] In some embodiments, a composition disrupts a biofilm of one or more oral microbes. In some embodiments, a fermentate disrupts a biofilm of one or more oral microbes. In some embodiments, a fermentate is produced by a bacterial strain that disrupts a biofilm of one or more oral microbes. In some embodiments, the oral microbe is a canine oral microbe. In some embodiments, the canine oral microbe is Neisseria canis. In some embodiments, the canine oral microbe is Bergeyella zoohelcum. In some embodiments, the composition reduces the surface area of an oral microbe biofilm by at least 5%, at least 10%, at least 15%, at least 20%, at least 25%, at least 30%, at least 35%, at least 40%, at least 45%, at least 50%, at least 55%, at least 60%, at least 65%, at least 70%, at least 75%, at least 80%, at least 85%, at least 90% or at least 95%. In some embodiments, the composition reduces the surface area of an oral microbe biofilm by 5-10%, 10-20%, 20-30%, 30-40%, 40-50%, 50-60%, 60-70%, 70-80%, 80-90%, or 90-100%. In some embodiments, the composition reduces the surface area of an oral microbe biofilm by 5-95%, 5-90%, 5-80%, 5-70%, 5-60%, 5-50%, 5-40%, 5-30%, 5-25%, 5-20%, 5-15%, or 5-10%. In some embodiments, the composition reduces the surface area of an oral microbe biofilm by 5-5 99%, 10-99%, 15-99%, 20-99%, 25-99%, 30-99%, 40-99%, 50-99%, 60-99%, 70-99%, 80-99%, or 90-99%.

### Enumerated Embodiments

1. A postbiotic composition comprising
[0253] (a) a fermentate of a first bacterial strain comprising a 16S rDNA sequence with at least 97% sequence identity to the nucleic acid sequence of any one of SEQ ID NOs: 1-4; and
[0254] (b) one or more additional fermentates,
[0255] wherein each of the one or more additional fermentates are of a bacterial strain comprising a 16S rDNA sequence with at least 97% sequence identity to the nucleic acid sequence of any one of SEQ ID NO: 5-9.
   2. The composition of Embodiment 1, wherein the bacterial strain of (a) is capable of disrupting a biofilm of one or more canine oral microbes.
   3. The composition of Embodiment 1 or 2, wherein the bacterial strain of (b) is capable of
[0256] (i) producing one or more compounds able to reduce the abundance of one or more volatile sulfur compounds (VSCs);
[0257] (ii) producing one or more antioxidants; and/or
[0258] (iii) enhancing a function of one or more bacterial strains.
   4. The composition of Embodiment 3, wherein the antioxidant is selected from the group consisting of a vitamin, an organic acid, a polyphenol, an indole-containing compound, and a phenol.
   5. The composition of Embodiment 4, the antioxidant is reactive to the ferric ion-reducing antioxidant power assay.
   6. A postbiotic composition comprising
[0259] (a) a first fermentate of a first bacterial strain comprising a 16S rDNA sequence with at least 97% sequence identity to the nucleic acid sequence of any one of SEQ ID NOs: 1-4; and
[0260] (b) a second fermentate of a second bacterial strain comprising a 16S rDNA sequence with at least 97% sequence identity to the nucleic acid sequence of SEQ ID NO: 5.
   7. The composition of Embodiment 6, further comprising:
[0261] (c) a third fermentate of a third bacterial strain comprising a 16s rDNA sequence with at least 97% sequence identity to the nucleic acid sequence of any one of SEQ ID NOs: 6-9.
   8. The composition of Embodiment 7, wherein
[0262] (a) the first bacterial strain comprises a 16S rDNA sequence with at least 97% sequence identity to the nucleic acid sequence of SEQ ID NO: 1 (B. subtilis);
[0263] (b) the second bacterial strain comprises a 16S rDNA sequence with at least 97% sequence identity to the nucleic acid sequence of SEQ ID NO: 5 (Pediococcus pentosaceus); and
[0264] (c) the third bacterial strain comprises a 16S rDNA sequence with at least 97% sequence identity to the nucleic acid sequence of SEQ ID NO: 6 (Lactiplantibacillus plantarum).
   9. The composition of Embodiment 8, wherein
[0265] (a) the first bacterial strain comprises a 16S rDNA sequence with at least 97% sequence identity to the nucleic acid sequence of SEQ ID NO: 1 (B. subtilis);
[0266] (b) the second bacterial strain comprises a 16S rDNA sequence with at least 97% sequence identity to the nucleic acid sequence of SEQ ID NO: 5 (Pedicoccus pentosaceus); and
[0267] (c) the third bacterial strain comprises a 16S rDNA sequence with at least 97% sequence identity to the nucleic acid sequence of SEQ ID NO: 9 (B. subtilis).
   10. A postbiotic composition comprising
[0268] (a) a first fermentate of a first bacterial strain comprising a 16S rDNA sequence with at least 97% sequence identity to the nucleic acid sequence of any one of SEQ ID NOs: 1-4; and
[0269] (b) a second fermentate of a second bacterial strain comprising a 16S rDNA sequence with at least 97% sequence identity to the nucleic acid sequence of any one of SEQ ID NOs: 6-9.
   11. The composition of Embodiment 10, further comprising a third fermentate of a third bacterial strain comprising a 16s rDNA sequence with at least 97% sequence identity to the nucleic acid sequence of SEQ ID NO: 5.
   12. The composition of Embodiment 11, wherein
[0270] (a) the first bacterial strain comprises a 16S rDNA sequence with at least 97% sequence identity to the nucleic acid sequence of SEQ ID NO: 1 (B. subtilis);
[0271] (b) the second bacterial strain comprises a 16S rDNA sequence with at least 97% sequence identity to the nucleic acid sequence of SEQ ID NO: 5 (Lactiplantibacillus plantarum); and
[0272] (c) the third bacterial strain comprises a 16S rDNA sequence with at least 97% sequence identity to the nucleic acid sequence of SEQ ID NO: 6 (Pedicoccus pentosaceus).
   13. A postbiotic composition comprising:
[0273] (a) a fermentate of a bacterial strain that disrupts an oral biofilm; and at least one of:
[0274] (b)(i) a fermentate of a bacterial strain that produces one or more compounds able to reduce the abundance of one or more volatile sulfur compounds (VSCs),
[0275] (b)(ii) a fermentate of a bacterial strain that produces one or more antioxidants; and
[0276] (b)(iii) a fermentate of a bacterial strain that enhances a function of one or more bacterial strains.
   14. The composition of Embodiment 13, wherein the bacterial strain of (a) is selected from the group consisting of Bacillus subtilis, Bacillus amyloliquefaciens, Bacillus licheniformis, and Bacillus pumilus.
   15. The composition of Embodiment 13 or 14, wherein the bacterial strain of (b)(i) is Pediococcus pentosaceus.
   16. The composition of Embodiment 13 or 15, wherein the bacterial strain of (b)(i) is selected from the group consisting of Pediococcus pentosaceus, Bacillus subtilis, and Lactiplantibacillus plantarum.
   17. The composition of any one of Embodiments 13-16, wherein the bacterial strain of (b)(ii) is selected from the group consisting of Lactiplantibacillus plantarum, Lactobacillus delbrueckii, and Limosilactobacillus fermentum.
   18. The composition of any one of Embodiments 13-17, wherein the bacterial strain of (b)(ii) is selected from the group consisting of Pediococcus pentosaceus, Lactiplantibacillus plantarum, Lactobacillus delbrueckii, and Limosilactobacillus fermentum.
   19. The composition of any one of Embodiments 13-18, wherein the bacterial strain of (b)(iii) is selected from the group consisting of Bacillus subtilis and Lactiplantibacillus plantarum.
   20. The composition of any one of Embodiments 1-19, wherein the composition reduces the abundance of one or more volatile sulfur compounds (VSCs) in an oral cavity of a subject.
   21. The composition of any one of Embodiments 1-20, wherein the composition reduces the abundance of one or more volatile sulfur compound (VSC)-producing microorganisms in a subject.
   22. The composition of Embodiment 21, wherein the one or more VSC-producing microorganisms are selected from the group consisting of Fusobacterium nucleatum, Neisseria canis, Bergyella zoohelcum, Prevotella intermedia, Porphyromonas canigingivalis, Porphyromonas gingivalis, Tannerella forsythia, and Treponema denticola.
   23. The composition of Embodiment 21 or 22, wherein the one or more VSCs are selected from the group consisting of hydrogen sulfide, methyl mercaptan, and dimethyl sulfide.
   24. The composition of any one of Embodiments 1-23, wherein the composition reduces the level of gum inflammation, gingivitis, plaque, tartar, and/or dental calculus accumulation in an oral cavity of a subject.
   25. The composition of any one of Embodiments 1-24, wherein the composition treats or prevents one or more symptom of halitosis in a subject.
   26. The composition of any one of Embodiments 1-25, wherein each of the fermentates are in powdered form.
   27. The composition of any one of Embodiments 1-26, wherein each of the fermentates are lyophilized or spray-dried.
   28. The composition of any one of Embodiments 1-27, wherein each fermentate is present in an amount of 1 to 500 mg per dose.
   29. The composition of any one of Embodiments 1-28, wherein the composition comprises a total amount of fermentate of 1 to 500 mg per dose.
   30. The composition of any one of Embodiments 1-29, further comprising a carrier.
   31. The composition of Embodiment 30, wherein the carrier is maltodextrin.
   32. The composition of Embodiment 30 or 31, wherein the carrier is a tapioca-based maltodextrin.
   33. A nutritional supplement, dental supplement, or food product comprising the composition of any one of Embodiments 1-32.
   34. The nutritional supplement, dental supplement, or food product of Embodiment 33, comprising the composition of any one of Embodiments 1-32 at an incorporation rate of 0.01% to 10% [w/w].
   35. A nutritional supplement, dental supplement, or food product of Embodiment 33 or 34, comprising the composition of any one of the preceding Embodiments at an incorporation rate of 0.1% to 2% [w/w].
   36. The nutritional supplement, dental supplement, or food product of any one of Embodiments 33-35, wherein the nutritional supplement is a canine nutritional supplement.
   37. The nutritional supplement, dental supplement, or food product of any one of Embodiments 33-36, wherein the nutritional supplement comprises a meat or animal-derived material.
   38. The nutritional supplement, dental supplement, or food product of Embodiment 37, wherein the meat or animal-derived material is beef, chicken, eggs, turkey, lamb, fish, blood marrow, and/or bone marrow.
   39. The nutritional supplement, dental supplement, or food product of any one of Embodiments 33-38, further comprising a grain.
   40. The nutritional supplement, dental supplement, or food product of Embodiment 39, wherein the grain is wheat, corn, rice, oats, and/or barley.
   41. The nutritional supplement, dental supplement, or food product of any one of Embodiments 33-39, further comprising a fiber.
   42. The nutritional supplement, dental supplement, or food product of Embodiment 41, wherein the fiber is sugar beet pulp, chicory pulp, chicory, coconut endosperm fiber, wheat fiber, fructooligosaccharides, galactooligosaccharides, and/or inulin.
   43. The nutritional supplement, dental supplement, or food product of any one of Embodiments 33-42, further comprising algae.
   44. The nutritional supplement, dental supplement, or food product of Embodiment 43, wherein the algae is selected from the group consisting of Ascophyllum nodosum, Spirulina, Chlorella, Ulva lactuca, Laminaria digitata and Fucus vesiculosus.
   45. The nutritional supplement, dental supplement, or food product of any one of Embodiments 33-44, further comprising a gelatinized starch matrix.
   46. The nutritional supplement, dental supplement, or food product of any one of Embodiments 33-45, wherein the nutritional supplement, dental supplement, or food product reduces inflammation in a subject.
   47. The nutritional supplement, dental supplement, or food product of any one of Embodiments 33-46, wherein the nutritional supplement, dental supplement, or food product treats or prevents a symptom associated with halitosis in a subject.
   48. The nutritional supplement, dental supplement, or food product of any one of Embodiments 33-47, wherein the dental supplement is an extruded or injection-molded dental stick.
   49. The nutritional supplement, dental supplement, or food product of any one of Embodiments 33-47, wherein the dental supplement is an extruded or injection-molded dental chew.
   50. The nutritional supplement, dental supplement, or food product of any one of Embodiments 33-47, wherein the nutritional supplement or dental supplement is a chew having a soft interior.
   51. The nutritional supplement, dental supplement, or food product of any one of Embodiments 33-47, wherein the nutritional supplement is a meal topper.
   52. The nutritional supplement, dental supplement, or food product of any one of Embodiments 33-47, wherein the nutritional supplement is a water additive.
   53. The nutritional supplement, dental supplement, or food product of any one of Embodiments 33-47, wherein the food product is an extruded kibble.
   54. The nutritional supplement, dental supplement, or food product of any one of Embodiments 33-47, wherein the food product is a fresh food.
   55. The nutritional supplement, dental supplement, or food product of any one of Embodiments 33-47, wherein the nutritional supplement is a liquid spray.
   56. The nutritional supplement, dental supplement, or food product of any one of Embodiments 33-47, wherein the food product is peanut butter spread.
   57. The nutritional supplement, dental supplement, or food product of any one of Embodiments 33-47, wherein the nutritional supplement, dental supplement, or food product is soft jerky chew.
   58. An oral care product comprising the composition of any one of Embodiments 1-32.
   59. The oral care product of Embodiment 58, comprising the composition of any one of Embodiments 1-32 at an incorporation rate of 0.01% to 10% [w/w].
   60. The oral care product of Embodiment 58 or 59, comprising the composition of any one of Embodiments 1-32 at an incorporation rate of 0.1% to 2% [w/w].
   61. The oral care product of any one of Embodiments 58-60, wherein the oral care product treats or prevents a symptom associated with halitosis in a subject.
   62. An oral care product of any one of Embodiments 58-61, wherein the oral care product is a toothpaste.
   63. An oral care product of any one of Embodiments 58-61, wherein the oral care product is a mouthwash.
   64. An oral care product of any one of Embodiments 58-61, wherein the oral care product is a breath mint.
   65. An oral care product of any one of Embodiments 58-61, wherein the oral care product is a chewing gum.
   66. A method comprising administering the composition of any one of Embodiments 1-32 or the nutritional supplement, dental supplement, or food product of any one of Embodiments 33-57 or the oral care product of any one of Embodiments 58-65 to a subject.
   67. The method of Embodiment 66, wherein the administration is oral administration.
   68. The method of Embodiment 66 or 67, wherein the subject has or is at risk of having halitosis.
   69. The method of any one of Embodiments 66-68, wherein an oral microenvironment of the subject comprises one or more bacterial strains selected from Porphyromonas gingivalis, Prevotella intermedia, Porphyromonas canigingivalis, Tannerella forsythia, Treponema denticola, Fusobacterium nucleatum, Neisseria canis, and Bergeyella zoohelcum.
   70. The method of any one of Embodiments 66-69, wherein administration of the composition, nutritional supplement, dental supplement, or food product:
[0277] (i) reduces the abundance of one or more VSCs in an oral microenvironment of the subject;
[0278] (ii) reduces inflammation in the oral microenvironment of the subject;
[0279] (iii) reduces the abundance of gingivitis, plaque, tartar, and/or dental calculus in the subject;
[0280] (iv) reduces the abundance of one or more microorganisms associated with the production of VSCs;
[0281] (v) reduces one or more symptom associated with halitosis; and/or
[0282] (vi) improves oral health of the subject.
   71. The method of any one of Embodiments 66-70, wherein the subject is a carnivore.
   72. The method of any one of Embodiments 66-71, wherein the subject is a mammal.
   73. The method of any one of Embodiments 66-72, wherein the subject is a domesticated animal.
   74. The method of any one of Embodiments 66-73, wherein the subject is a bovine, swine, llama, alpaca, sheep, or goat.
   75. The method of any one of Embodiments 66-73, wherein the subject is a dog, cat, rabbit, guinea pig, hamster, or ferret.
   76. The method of Embodiment 75, wherein the subject is a dog.
   77. The method of Embodiment 66-70, wherein the subject is a human.

### EQUIVALENTS AND SCOPE

[0283] While several inventive embodiments have been described and illustrated herein, those of ordinary skill in the art will readily envision a variety of other means and/or structures for performing the function and/or obtaining the results and/or one or more of the advantages described herein, and each of such variations and/or modifications is deemed to be within the scope of the inventive embodiments described herein. More generally, those skilled in the art will readily appreciate that all parameters, dimensions, materials, and configurations described herein are meant to be exemplary and that the actual parameters, dimensions, materials, and/or configurations will depend upon the specific application or applications for which the inventive teachings is/are used. Those skilled in the art will recognize, or be able to ascertain using no more than routine experimentation, many equivalents to the specific inventive embodiments described herein. It is, therefore, to be understood that the foregoing embodiments are presented by way of example only and that, within the scope of the appended claims and equivalents thereto, inventive embodiments may be practiced otherwise than as specifically described and claimed. Inventive embodiments of the present disclosure are directed to each individual feature, system, article, material, kit, and/or method described herein. In addition, any combination of two or more such features, systems, articles, materials, kits, and/or methods, if such features, systems, articles, materials, kits, and/or methods are not mutually inconsistent, is included within the inventive scope of the present disclosure.

[0284] All definitions, as defined and used herein, should be understood to control over dictionary definitions, definitions in documents incorporated by reference, and/or ordinary meanings of the defined terms.

[0285] All references, patents and patent applications disclosed herein are incorporated by reference with respect to the subject matter for which each is cited, which in some cases may encompass the entirety of the document.

[0286] The indefinite articles “a” and “an,” as used herein in the specification and in the claims, unless clearly indicated to the contrary, should be understood to mean “at least one.”

[0287] The phrase “and/or,” as used herein in the specification and in the claims, should be understood to mean “either or both” of the elements so conjoined, i.e., elements that are conjunctively present in some cases and disjunctively present in other cases. Multiple elements listed with “and/or” should be construed in the same fashion, i.e., “one or more” of the elements so conjoined. Other elements may optionally be present other than the elements specifically identified by the “and/or” clause, whether related or unrelated to those elements specifically identified. Thus, as a non-limiting example, a reference to “A and/or B”, when used in conjunction with open-ended language such as “comprising” can refer, in some embodiments, to A only (optionally including elements other than B); in another embodiment, to B only (optionally including elements other than A); in yet another embodiment, to both A and B (optionally including other elements); etc. As used herein in the specification and in the claims, “or” should be understood to have the same meaning as “and/or” as defined above. For example, when separating items in a list, “or” or “and/or” shall be interpreted as being inclusive, i.e., the inclusion of at least one, but also including more than one, of a number or list of elements, and, optionally, additional unlisted items. Only terms clearly indicated to the contrary, such as “only one of” or “exactly one of,” or, when used in the claims, “consisting of,” will refer to the inclusion of exactly one element of a number or list of elements. In general, the term “or” as used herein shall only be interpreted as indicating exclusive alternatives (i.e. “one or the other but not both”) when preceded by terms of exclusivity, such as “either,” “one of,” “only one of,” or “exactly one of.” “Consisting essentially of,” when used in the claims, shall have its ordinary meaning as used in the field of patent law.

[0288] As used herein in the specification and in the claims, the phrase “at least one,” in reference to a list of one or more elements, should be understood to mean at least one element selected from any one or more of the elements in the list of elements, but not necessarily including at least one of each and every element specifically listed within the list of elements and not excluding any combinations of elements in the list of elements. This definition also allows that elements may optionally be present other than the elements specifically identified within the list of elements to which the phrase “at least one” refers, whether related or unrelated to those elements specifically identified. Thus, as a non-limiting example, “at least one of A and B” (or, equivalently, “at least one of A or B,” or, equivalently “at least one of A and/or B”) can refer, in some embodiments, to at least one, optionally including more than one, A, with no B present (and optionally including elements other than B); in another embodiment, to at least one, optionally including more than one, B, with no A present (and optionally including elements other than A); in yet another embodiment, to at least one, optionally including more than one, A, and at least one, optionally including more than one, B (and optionally including other elements); etc. Each possibility represents a separate embodiment of the present invention.

[0289] It should be understood that, unless clearly indicated to the contrary, the disclosure of numerical values and ranges of numerical values in the specification includes both i) the exact value(s) or range specified, and ii) values that are “about” the value(s) or ranges specified (e.g., values or ranges falling within a reasonable range (e.g., about 10% similar)) as would be understood by a person of ordinary skill in the art.

[0290] It should also be understood that, unless clearly indicated to the contrary, in any methods disclosed herein that include more than one step or act, the order of the steps or acts of the method is not necessarily limited to the order in which the steps or acts of the method are disclosed.

[0291] In the claims, as well as in the specification above, all transitional phrases such as “comprising,” “including,” “carrying,” “having,” “containing,” “involving,” “holding,” “composed of,” and the like are to be understood to be open-ended, i.e., to mean including but not limited to. Only the transitional phrases “consisting of” and “consisting essentially of” shall be closed or semi-closed transitional phrases, respectively, as set forth in the United States Patent Office Manual of Patent Examining Procedures, Section 2111.03.

### EXAMPLES

[0292] Examples 1-3 and 5 describe experiments that have actually been conducted. Example 4 is a prophetic example. Where examples refer to the postbiotic composition containing fermentates of Strains 1 and 5, by the term “Canine Oral Health Postbiotic” or “(COHP)”, the skilled artisan will appreciate that the utility of such compositions is not limited to canines, as reducing abundance of volatile sulfur compounds, killing oral microbes, and/or disrupting oral biofilms is beneficial in the context of halitosis of other species, such as other domesticated animals (e.g., cats) and humans.

### Example 1: Identification of Fermentates Reducing Volatile Sulfur Compound (VSC) Abundance and Disrupting Biofilms

[0293] Bacterial strains associated with bad breath in dogs, due to production of malodorous volatile sulfur compounds (VSCs), were identified. Fusobacterium nucleatum was used as an exemplary bacterial strain the model used in experiments described in this Example due to its role in early stages of halitosis. F. nucleatum was grown for 2 days, treated with one of a panel of experimental compositions outlined in the table below, then allowed to grow for another 24 hours. VSC levels were quantified at the end of this 24-hour period.

| Composition | Contents |
|---|---|
| Negative Control | Media only |
| Positive Control | Acetic acid solution |
| Fermentate A | Fermentate of bacterial strain with 16S rDNA |
| | sequence of SEQ ID NO: 6 |
| Fermentate B | Fermentate of bacterial strain with 16S rDNA |
| | sequence of SEQ ID NO: 1 |
| Fermentate C | Fermentate of bacterial strain with 16S rDNA |
| | sequence of SEQ ID NO: 5 |
| Fermentate | Fermentate of 1:1:1 mixture of bacterial |
| A + B + C | strains having 16S rDNA sequences of SEQ |
| | ID NOs. 1, 5, and 6. |

[0294] VSC levels were assayed using a colorimetric assay based on the interaction between free sulfhydryl groups in solution and DTNB (5,5′-Dithiobis (2-nitrobenzoic acid)), which cause the solution to change color. Changes in absorption were measured and normalized to the positive and negative control groups.

[0295] At the relevant dosage, a statistically significant reduction in VSC of 50%, as well as synergy between the strains, was observed with the fermentate of strains A, B, and C (FIG. 1). Reduction is dose-dependent, with VSCs being further increased at higher doses of fermentate (FIG. 2).

[0296] Fermentate compositions were further evaluated for their ability to disrupt biofilms of canine oral microflora. Canine oral microbiome samples were collected from dogs. Individual strains were isolated and identified through sequencing. Two canine strains were selected based on their ability to form biofilms and also produce VSCs: Neisseria canis and Bergeyella zoohelcum.

[0297] Canine oral microflora strains were grown for 24 hours in liquid media, treated with a fermentate composition (or positive control (protease K solution) or negative control (media only)), and rinsed to remove any debris. To quantify biofilm disruption, samples were labeled with DAPI, then imaged with a high-content optical microscope. Resulting images were processed to quantify the area covered in biofilm.

[0298] At the relevant dosage and treatment time (5 minutes), statistically significant biofilm disruption was observed following treatment with fermentate of a bacterial strain having a 16S rDNA sequence of SEQ ID NO: 1 (FIG. 3). While negative control (media only) resulted in a biofilm area of 54%, treatment with fermentates showed a near-complete biofilm disruption, resulting in a biofilm area of only 13%. These results indicate that fermentates have the ability of disrupt biofilm of an oral canine microbe.

[0299] In another experiment, a biofilm-forming microbe isolated from canine oral microbiota and observed to produce VSCs was grown in microwell plates for 24 hours. Each well was treated for five minutes with a different test fermentate, and wells were then washed. Wells were labeled with DNA-staining dye DAPI and imaged using fluorescence microscopy to measure biofilm areas in each well, which were normalized to wells treated with a negative control (media only). Test materials included individual fermentates of 53 different Bacillus subtilis strains. 88% of the Bacillus subtilis fermentates achieved a statistically significant reduction in biofilm area, with 75% of fermentates reducing biofilm area by more than 50% (FIG. 4). These results support the general ability of Bacillus subtilis fermentates to disrupt canine oral microbiota biofilms.

[0300] In another experiment, microbes isolated from canine oral cavities were screened for their ability to produce VSCs in vitro. Of sixteen genera screened, five (31%) were able to produce VSCs, including Neisseria and Bergeyella.

### Example 2: In Vivo Effects of Fermentate Mixtures in Reducing VSC Abundance and Reducing Abundance of Pathogenic and VSC-Producing Canine Oral Microbe Taxa

[0301] In a clinical study, dogs received either (i) a Placebo powder, or (ii) a powder containing a mixture of a dry fermentate of a bacterial strain with 16S rDNA sequence of SEQ ID NO: 1 (Fermentate A) and of a bacterial strain with 16S rDNA sequence of SEQ ID NO: 5 (Fermentate B), termed Canine Oral Health Postbiotic (COHP). The Placebo powder was tapioca maltodextrin.

[0302] The dogs received their assigned treatment each day for 7 days. The treatment was delivered as a powder meal topper on the first meal of the day. Total VSC levels in the oral cavity were assayed using a Halimeter® PLUS instrument on Day 0 and Day 7. COHP treatment resulted in a significant decrease in VSC levels after 7 days of treatment (p=0.002), while the placebo group had no significant change in VSC levels after 7 days of treatment (p=0.455) (FIG. 5, Wilcoxon matched-pairs signed rank test, one-tailed).

[0303] In a separate study, another group of dogs received either (i) Placebo powder, or (ii) a COHP powder containing a 1:1 mixture of a dry fermentate of a bacterial strain with 16S rDNA sequence of SEQ ID NO: 1 (Fermentate A) and of a bacterial strain with 16S rDNA sequence of SEQ ID NO: 5 (Fermentate B). The Placebo powder was tapioca maltodextrin. The dogs received their assigned treatment every day for 7 days. The treatment was delivered as a powder meal topper on the first meal of the day. To quantify abundance of different oral microbiome members, oral swabs were taken from four quadrants of each subject's oral cavity on day 0 (TO) and day 7 (T7).

[0304] DNA was extracted with individual quadrants (biological replicates) per subject per time point being processed as separate samples. The V4 region of the 16S rRNA gene was amplified with sequencing primers and the resulting libraries were pooled and sequenced on the Illumina platform. Counts of the operational taxonomic units (OTUs) were determined for each library using USEARCH. Edgar, drive5.com. Taxa that were detected fewer than 20 times in at least 20% of samples were removed, and read counts were standardized to the median sequencing depth. Fold changes were calculated for each subject as the T7 abundance relative to the TO time point, and log 2 of the fold change for OTUs with a false discovery rate (FDR)-corrected p-value less than 0.01 was plotted (FIGS. 6A and 6B). The Wald test was used in DESeq2 for hypothesis testing to determine significance of fold changes for each OTU.

[0305] The number of OTUs that increased in abundance was similar for both groups, with 17 OTUs increasing for the control group and 18 increasing for the treatment group. Only one OTU decreased for the Placebo group, while markedly more OTUs (9) exhibited reduced abundance in the COHP treatment group, including the taxa Frederiksenia, Trichococcus, Neisseria, Abiotrophia, Corynebacterium, Bergeyella, Bangiophyceae, Ulvibacter, and Arcobacter. Neisseria and Bergeyella, in particular, were found in Example 1 to produce VSCs, and so their reduction in the Treatment group underscores the ability of COHP containing Fermentates A and B to reduce the abundance of VSC-producing microbes in the canine oral cavity.

[0306] Of the OTUs that changed in abundance in this study, many are known to be pathogenic. Known pathogenic OTUs in the Placebo group represented 23% of the total number of OTUs that increased in abundance from day 0 to day 7. Similarly, 22% of the OTUs that increased in the treatment group are known pathogens. Among the OTUs that decreased, however, the single decreased OTU in the Placebo group is not known to cause disease, but 7 of 9 (78%) of the OTUs that decreased in abundance in the Treatment group are considered pathogenic. These results thus support the ability of COHP containing Fermentates A and B to reduce the abundance of pathogenic microorganisms in the canine oral cavity, thereby improving oral health.

### Example 3: Identification of Fermentates Reducing VSC Abundance and Disrupting Biofilms with Neisseria canis

[0307] Bacterial strains associated with bad breath in dogs, due to production of malodorous volatile sulfur compounds (VSCs), were identified. Neisseria canis was used as an exemplary bacterial strain the model used in experiments described in this Example due to its ability to (i) form biofilms, and (ii) produce VSCs. N. canis was grown for 2 days in a flask, then for 1 day in a microwell plate, and finally treated with one of a panel of experimental compositions outlined in the table below for five minutes. Then, a VSC levels assessment or a biofilm disruption assessment was performed.

| Composition | Contents |
|---|---|
| Negative Control | Media only |
| Positive Control | Proteinase K solution |
| Fermentate | Fermentates of (A) a bacterial strain having a 16S |
| A + B | rDNA sequence of SEQ ID NO: 1, and (B) a bacterial |
| (COHP) | strain having a 16S rDNA sequence of SEQ ID NO: 5, |
| | combined in a 1:2.4 ratio (1 part Fermentate A + |
| | 2.4 parts Fermentate B) |

[0308] After washing with media at the end of the treatment time, samples were allowed to grow for another 24 hours. VSC levels were quantified at the end of this 24-hour period. VSC levels were assayed using a colorimetric assay based on the interaction between free sulfhydryl groups in solution and DTNB (5,5′-Dithiobis (2-nitrobenzoic acid)), which cause the solution to change color. Changes in absorption were measured and normalized to the positive and negative control groups. At the relevant dosage, a statistically significant reduction in VSCs by an average of 85% was measured with fermentate A+B (FIG. 7). The negative control (media only treatment) resulted in a normalized VSC level of 100%. The average decrease of 85% is statistically significant when compared to the negative control group (p-value: 0.0002, Dunnett's test for comparing several treatments with a control, 95% family-wise confidence level, two-sided).

[0309] After washing with a phosphate buffer solution at the end of the treatment time, samples were labeled with DAPI, then imaged with a high-content optical microscope. Resulting images were processed to quantify the area covered in biofilm. At the relevant dosage and treatment time, COHP demonstrated a near-complete biofilm disruption with a normalized biofilm reduction of 98%, which was equivalent to that of the positive control (FIG. 8). The decrease in biofilm area due to COHP treatment is statistically significant when compared to the negative control group (p-value <0.0001, Dunnett's test for comparing several treatments with a control, 95% family-wise confidence level, two-sided).

### Example 4: Canine Clinical Study Evaluating Dental Plaque and Tartar

[0310] This Example describes a planned clinical study in canine subjects.

[0311] In a double-blind placebo-controlled clinical study, dogs receive either (i) a Placebo powder, or (ii) a powder containing a mixture of a dry fermentate of a bacterial strain with 16S rDNA sequence of SEQ ID NO: 1 (Fermentate A) and of a bacterial strain with 16S rDNA sequence of SEQ ID NO: 5 (Fermentate B). The Placebo powder is tapioca maltodextrin.

[0312] Prior to treatment, dogs receive a dental cleaning as per the Veterinary Oral Health Council protocol. Dogs receive their assigned treatment each day for 28 days. The treatment is delivered as a powder meal topper on the first meal of the day. The amount of dental plaque is assessed on the last day of treatment using Plaque Index (modified Logan & Boyce). The amount of calculus/tartar is assessed on the last day of treatment using Calculus/Tartar Index (modified Warrick & Gorrel). The health of gums is assessed on the last day of treatment and prior to treatment using Gingival Index (Loe & Silness). The amount of oral VSC is quantified on the last day of treatment using a Halimeter® Plus device.

### Example 5: Evaluation of Changes in VSC Abundance and Oral Microbes in Two Canine Clinical Studies

[0313] In a first double-blind placebo-controlled clinical study, dogs received either (i) a Placebo powder, or (ii) a powder containing a mixture of a dry fermentate of a bacterial strain with 16S rDNA sequence of SEQ ID NO: 1 (Fermentate A) and of a bacterial strain with 16S rDNA sequence of SEQ ID NO: 5 (Fermentate B), termed Canine Oral Health Postbiotic (COHP). The Placebo powder was tapioca maltodextrin. The dogs received their assigned treatment each day for 14 days. The treatment was delivered as a powder meal topper on the first meal of the day. Total VSC levels in the oral cavity were assayed using a Halimeter® PLUS instrument on Day 0, Day 7, and Day 14.

[0314] After 7 days of treatment, COHP reduced VSC levels from baseline (median change=−28%; p=0.002, paired Wilcoxon one-tailed test, FIG. 9), while the placebo did not (p=0.455, paired Wilcoxon one-tailed test). Additionally, on Days 7 and 14, VSC levels in the COHP group were lowered by 27% compared to the placebo group (p=0.004, mixed linear regression of log-transformed data, FIG. 9).

[0315] In the same study, two samples of the oral microbiome were taken by running a swab along the gum line for 5-10 seconds on the left and right side of the mouth. DNA was extracted from the oral swabs of each side individually and the V4 region of the 16S rRNA gene was amplified and sequenced on the Illumina platform. Counts of the zero-radius operational taxonomic units (ZOTUs, or taxa), which distinguish exact sequence variants, were determined for each library using USEARCH and were standardized to the sequencing depth and used for analysis. The DESeq2 package was utilized to detect taxa with significant differences across groups.

[0316] COHP reduced abundance of taxa that are associated with periodontal disease, produce VSCs, and form biofilms. COHP decreased the abundance of two taxa (FIG. 10A): Porphyromonas cangingivalis, the most prevalent oral pathogen in dogs with early periodontal disease, and Bergeyella zoohelcum, a biofilm-former & VSC producer. Holcombe et al., 2014. PloS One. 9 (12): e113744. A decrease in the abundance of taxa in the Bergeyella genus was also observed during the in vivo study described in Example 2. In addition, COHP increased microbiome community evenness on Day 7 (p=0.027, paired Wilcoxon two-tailed test, 4.6% increase, FIG. 10B; middle panel) and Day 14 (p=0.003, paired Wilcoxon two-tailed test, 5.8% increase). COHP did not increase the number of unique taxa present (FIG. 10B; left panel) in the oral microbiome. Evenness and diversity is generally associated with microbiome robustness, resilience and health.

[0317] In a second double-blind placebo-controlled clinical study, another group of dogs received either (i) Placebo powder, or (ii) a COHP powder containing a 1:1 mixture of a dry fermentate of a bacterial strain with 16S rDNA sequence of SEQ ID NO: 1 (Fermentate A) and of a bacterial strain with 16S rDNA sequence of SEQ ID NO: 5 (Fermentate B). The Placebo powder was tapioca maltodextrin. The dogs received their assigned treatment each day for 14 days. The treatment was delivered as a powder meal topper on the first meal of the day. Total VSC levels in the oral cavity were assayed using a Halimeter® PLUS instrument on Day 0, Day 7, and Day 14 together with breath scoring. For breath scoring, a veterinary technician indicated their perception of each dog's breath by choosing a number from 1-10, with 1 indicating no bad odors present and 10 indicating a high level of malodor such that they could not tolerate the smell of the dog's breath.

[0318] VSC levels were correlated with perceived malodor (FIG. 11). Consistent with the VSC level results, the placebo drove an increasing trend in perceived malodor at Day 14 (absolute change=+0.8 points; p=0.06, paired Wilcoxon one-tailed test), whereas perceived malodor did not change in the COHP group (absolute change=−0.3 points; p=0.3, paired Wilcoxon one-tailed test). Subsequently, COHP trended toward decreasing perceived malodor by one point more from baseline compared to the placebo group on Day 14 (p=0.06, one-tailed Mann-Whitney test on the absolute odor score difference).

The application's sequence listing, which the Patent Office published only in electronic form, follows.

SEQUENCE LISTING (18 sequences)

SEQ ID NO: 1 - DNA, 1459 bp, Bacillus subtilis
  source 1..1459: mol_type = genomic DNA
atgttagcggcggacgggtgagtaacacgtgggtaacctgcctgtaagactgggataactccgggaaaccggggctaataccggatggttgtttgaaccgcatggttcaaacataaaaggtggcttcggctaccacttacagatggacccgcggcgcattagctagttggtgaggtaacggctcaccaaggcaacgatgcgtagccgacctgagagggtgatcggccacactgggactgagacacggcccagactcctacgggaggcagcagtagggaatcttccgcaatggacgaaagtctgacggagcaacgccgcgtgagtgatgaaggttttcggatcgtaaagctctgttgttagggaagaacaagtaccgttcgaatagggcggtaccttgacggtacctaaccagaaagccacggctaactacgtgccagcagccgcggtaatacgtaggtggcaagcgttgtccggaattattgggcgtaaagggctcgcaggcggtttcttaagtctgatgtgaaagcccccggctcaaccggggagggtcattggaaactggggaacttgagtgcagaagaggagagtggaattccacgtgtagcggtgaaatgcgtagagatgtggaggaacaccagtggcgaaggcgactctctggtctgtaactgacgctgaggagcgaaagcgtggggagcgaacaggattagataccctggtagtccacgccgtaaacgatgagtgctaagtgttagggggtttccgccccttagtgctgcagctaacgcattaagcactccgcctggggagtacggtcgcaagactgaaactcaaaggaattgacgggggcccgcacaagcggtggagcatgtggtttaattcgaagcaacgcgaagaaccttaccaggtcttgacatcctctgacaatcctagagataggacgtccccttcgggggcagagtgacaggtggtgcatggttgtcgtcagctcgtgtcgtgagatgttgggttaagtcccgcaacgagcgcaacccttgatcttagttgccagcattcagttgggcactctaaggtgactgccggtgacaaaccggaggaaggtggggatgacgtcaaatcatcatgccccttatgacctgggctacacacgtgctacaatggacagaacaaagggcagcgaaaccgcgaggttaagccaatcccacaaatctgttctcagttcggatcgcagtctgcaactcgactgcgtgaagctggaatcgctagtaatcgcggatcagcatgccgcggtgaatacgttcccgggccttgtacacaccgcccgtcacaccacgagagtttgtaacacccgaagtcggtgaggtaaccttttaggagccagccgccgaaggtgggacagatgattggggtgaagtcgtaacaaggtagccgtatcggaaggtgcggctggatcacctccttt

SEQ ID NO: 2 - DNA, 1546 bp, Bacillus amyloliquefaciens
  source 1..1546: mol_type = genomic DNA
cggagagtttgatcctggctcaggacgaacgctggcggcgtgcctaatacatgcaagtcgagcggacagatgggagcttgctccctgatgttagcggcggacgggtgagtaacacgtgggtaacctgcctgtaagactgggataactccgggaaaccggggctaataccggatgcttgtttgaaccgcatggttcaaacataaaaggtggcttcggctaccacttacagatggacccgcggcgcattagctagttggtgaggtaacggctcaccaaggcgacgatgcgtagccgacctgagagggtgatcggccacactgggactgagacacggcccagactcctacgggaggcagcagtagggaatcttccgcaatggacgaaagtctgacggagcaacgccgcgtgagtgatgaaggttttcggatcgtaaagctctgttgttagggaagaacaagtgccgttcaaatagggcggcaccttgacggtacctaaccagaaagccacggctaactacgtgccagcagccgcggtaatacgtaggtggcaagcgttgtccggaattattgggcgtaaagggctcgcaggcggtttcttaagtctgatgtgaaagcccccggctcaaccggggagggtcattggaaactggggaacttgagtgcagaagaggagagtggaattccacgtgtagcggtgaaatgcgtagagatgtggaggaacaccagtggcgaaggcgactctctggtctgtaactgacgctgaggagcgaaagcgtggggagcgaacaggattagataccctggtagtccacgccgtaaacgatgagtgctaagtgttagggggtttccgccccttagtgctgcagctaacgcattaagcactccgcctggggagtacggtcgcaagactgaaactcaaaggaattgacgggggcccgcacaagcggtggagcatgtggtttaattcgaagcaacgcgaagaaccttaccaggtcttgacatcctctgacaatcctagagataggacgtccccttcgggggcagagtgacaggtggtgcatggttgtcgtcagctcgtgtcgtgagatgttgggttaagtcccgcaacgagcgcaacccttgatcttagttgccagcattcagttgggcactctaaggtgactgccggtgacaaaccggaggaaggtggggatgacgtcaaatcatcatgccccttatgacctgggctacacacgtgctacaatgggcagaacaaagggcagcgaaaccgcgaggttaagccaatcccacaaatctgttctcagttcggatcgcagtctgcaactcgactgcgtgaagctggaatcgctagtaatcgcggatcagcatgccgcggtgaatacgttcccgggccttgtacacaccgcccgtcacaccacgagagtttgtaacacccgaagtcggtgaggtaacctttttggagccagccgccgaaggtgggacagatgattggggtgaagtcgtaacaaggtagccgtatcggaaggtgcggctggatcacctccttt

SEQ ID NO: 3 - DNA, 1325 bp, Bacillus licheniformis
  source 1..1325: mol_type = genomic DNA
cacttacagatggacccgcggcgcattagctagttggtgaggtaacggctcaccaaggcgacgatgcgtagccgacctgagagggtgatcggccacactgggactgagacacggcccagactcctacgggaggcagcagtagggaatcttccgcaatggacgaaagtctgacggagcaacgccgcgtgagtgatgaaggttttcggatcgtaaaactctgttgttagggaagaacaagtaccgttcgaatagggcggtaccttgacggtacctaaccagaaagccacggctaactacgtgccagcagccgcggtaatacgtaggtggcaagcgttgtccggaattattgggcgtaaagcgcgcgcaggcggtttcttaagtctgatgtgaaagcccccggctcaaccggggagggtcattggaaactggggaacttgagtgcagaagaggagagtggaattccacgtgtagcggtgaaatgcgtagagatgtggaggaacaccagtggcgaaggcgactctctggtctgtaactgacgctgaggcgcgaaagcgtggggagcgaacaggattagataccctggtagtccacgccgtaaacgatgagtgctaagtgttagagggtttccgccctttagtgctgcagcaaacgcattaagcactccgcctggggagtacggtcgcaagactgaaactcaaaggaattgacgggggcccgcacaagcggtggagcatgtggtttaattcgaagcaacgcgaagaaccttaccaggtcttgacatcctctgacaaccctagagatagggcttccccttcgggggcagagtgacaggtggtgcatggttgtcgtcagctcgtgtcgtgagatgttgggttaagtcccgcaacgagcgcaacccttgatcttagttgccagcattcagttgggcactctaaggtgactgccggtgacaaaccggaggaaggtggggatgacgtcaaatcatcatgccccttatgacctgggctacacacgtgctacaatgggcagaacaaagggcagcgaagccgcgaggctaagccaatcccacaaatctgttctcagttcggatcgcagtctgcaactcgactgcgtgaagctggaatcgctagtaatcgcggatcagcatgccgcggtgaatacgttcccgggccttgtacacaccgcccgtcacaccacgagagtttgtaacacccgaagtcggtgaggtaaccttttggagccagccgccgaaggtgggacagatgattggggtgaagtcgtaacaaggtagccgtatcggaaggtgcggctggatcacctccttt

SEQ ID NO: 4 - DNA, 1517 bp, Bacillus pumilus
  source 1..1517: mol_type = genomic DNA
acgctggcggcgtgcctaatacatgcaagtcgagcggacagaagggagcttgctcccggatgttagcggcggacgggtgagtaacacgtgggtaacctgcctgtaagactgggataactccgggaaaccggagctaataccggatagttccttgaaccgcatggttcaaggatgaaagacggtttcggctgtcacttacagatggacccgcggcgcattagctagttggtggggtaatggctcaccaaggcgacgatgcgtagccgacctgagagggtgatcggccacactgggactgagacacggcccagactcctacgggaggcagcagtagggaatcttccgcaatggacgaaagtctgacggagcaacgccgcgtgagtgatgaaggttttcggatcgtaaagctctgttgttagggaagaacaagtgcgagagtaactgctcgcaccttgacggtacctaaccagaaagccacggctaactacgtgccagcagccgcggtaatacgtaggtggcaagcgttgtccggaattattgggcgtaaagggctcgcaggcggtttcttaagtctgatgtgaaagcccccggctcaaccggggagggtcattggaaactgggaaacttgagtgcagaagaggagagtggaattccacgtgtagcggtgaaatgcgtagagatgtggaggaacaccagtggcgaaggcgactctctggtctgtaactgacgctgaggagcgaaagcgtggggagcgaacaggattagataccctggtagtccacgccgtaaacgatgagtgctaagtgttagggggtttccgccccttagtgctgcagctaacgcattaagcactccgcctggggagtacggtcgcaagactgaaactcaaaggaattgacgggggcccgcacaagcggtggagcatgtggtttaattcgaagcaacgcgaagaaccttaccaggtcttgacatcctctgacaaccctagagatagggctttcccttcggggacagagtgacaggtggtgcatggttgtcgtcagctcgtgtcgtgagatgttgggttaagtcccgcaacgagcgcaacccttgatcttagttgccagcatttagttgggcactctaaggtgactgccggtgacaaaccggaggaaggtggggatgacgtcaaatcatcatgccccttatgacctgggctacacacgtgctacaatggacagaacaaagggctgcgagaccgcaaggtttagccaatcccataaatctgttctcagttcggatcgcagtctgcaactcgactgcgtgaagctggaatcgctagtaatcgcggatcagcatgccgcggtgaatacgttcccgggccttgtacacaccgcccgtcacaccacgagagtttgcaacacccgaagtcggtgaggtaacctttatggagccagccgccgaaggtggggcagatgattggggtgaagtcgtaacaaggtagccgtatcggaaggtgcggctggatcacctccttt

SEQ ID NO: 5 - DNA, 1572 bp, Pediococcus pentosaceus
  source 1..1572: mol_type = genomic DNA
atgagagtttgatcttggctcaggatgaacgctggcggcgtgcctaatacatgcaagtcgaacgaacttccgttaattgattatgacgtacttgtactgattgagattttaacacgaagtgagtggcgaacgggtgagtaacacgtgggtaacctgcccagaagtaggggataacacctggaaacagatgctaataccgtataacagagaaaaccgcatggttttcttttaaaagatggctctgctatcacttctggatggacccgcggcgtattagctagttggtgaggtaaaggctcaccaaggcagtgatacgtagccgacctgagagggtaatcggccacattgggactgagacacggcccagactcctacgggaggcagcagtagggaatcttccacaatggacgcaagtctgatggagcaacgccgcgtgagtgaagaagggtttcggctcgtaaagctctgttgttaaagaagaacgtgggtaagagtaactgtttacccagtgacggtatttaaccagaaagccacggctaactacgtgccagcagccgcggtaatacgtaggtggcaagcgttatccggatttattgggcgtaaagcgagcgcaggcggtcttttaagtctaatgtgaaagccttcggctcaaccgaagaagtgcattggaaactgggagacttgagtgcagaagaggacagtggaactccatgtgtagcggtgaaatgcgtagatatatggaagaacaccagtggcgaaggcggctgtctggtctgcaactgacgctgaggctcgaaagcatgggtagcgaacaggattagataccctggtagtccatgccgtaaacgatgattactaagtgttggagggtttccgcccttcagtgctgcagctaacgcattaagtaatccgcctggggagtacgaccgcaaggttgaaactcaaaagaattgacgggggcccgcacaagcggtggagcatgtggtttaattcgaagctacgcgaagaaccttaccaggtcttgacatcttctgacagtctaagagattagaggttcccttcggggacagaatgacaggtggtgcatggttgtcgtcagctcgtgtcgtgagatgttgggttaagtcccgcaacgagcgcaacccttattactagttgccagcattaagttgggcactctagtgagactgccggtgacaaaccggaggaaggtggggacgacgtcaaatcatcatgccccttatgacctgggctacacacgtgctacaatggatggtacaacgagtcgcgagaccgcgaggttaagctaatctcttaaaaccattctcagttcggactgtaggctgcaactcgcctacacgaagtcggaatcgctagtaatcgcggatcagcatgccgcggtgaatacgttcccgggccttgtacacaccgcccgtcacaccatgagagtttgtaacacccaaagccggtggggtaaccttttaggagctagccgtctaaggtgggacagatgattagggtgaagtcgtaacaaggtagccgtaggagaacctgcggctggatcacctcctt

SEQ ID NO: 6 - DNA, 1328 bp, unidentified
  source 1..1328: mol_type = genomic DNA; note = Lactiplantibacillus plantarum
ctatcacttttggatggtcccgcggcgtattagctagatggtggggtaacggctcaccatggcaatgatacgtagccgacctgagagggtaatcggccacattgggactgagacacggcccaaactcctacgggaggcagcagtagggaatcttccacaatggacgaaagtctgatggagcaacgccgcgtgagtgaagaagggtttcggctcgtaaaactctgttgttaaagaagaacatatctgagagtaactgttcaggtattgacggtatttaaccagaaagccacggctaactacgtgccagcagccgcggtaatacgtaggtggcaagcgttgtccggatttattgggcgtaaagcgagcgcaggcggttttttaagtctgatgtgaaagccttcggctcaaccgaagaagtgcatcggaaactgggaaacttgagtgcagaagaggacagtggaactccatgtgtagcggtgaaatgcgtagatatatggaagaacaccagtggcgaaggcggctgtctggtctgtaactgacgctgaggctcgaaagtatgggtagcaaacaggattagataccctggtagtccataccgtaaacgatgaatgctaagtgttggagggtttccgcccttcagtgctgcagctaacgcattaagcattccgcctggggagtacggccgcaaggctgaaactcaaaggaattgacgggggcccgcacaagcggtggagcatgtggtttaattcgaagctacgcgaagaaccttaccaggtcttgacatactatgcaaatctaagagattagacgttcccttcggggacatggatacaggtggtgcatggttgtcgtcagctcgtgtcgtgagatgttgggttaagtcccgcaacgagcgcaacccttattatcagttgccagcattaagttgggcactctggtgagactgccggtgacaaaccggaggaaggtggggatgacgtcaaatcatcatgccccttatgacctgggctacacacgtgctacaatggatggtacaacgagttgcgaactcgcgagagtaagctaatctcttaaagccattctcagttcggattgtaggctgcaactcgcctacatgaagtcggaatcgctagtaatcgcggatcagcatgccgcggtgaatacgttcccgggccttgtacacaccgcccgtcacaccatgagagtttgtaacacccaaagtcggtggggtaaccttttaggaaccagccgcctaaggtgggacagatgattagggtgaagtcgtaacaaggtagccgtaggagaacctgcggctggatcacctcctt

SEQ ID NO: 7 - DNA, 1525 bp, Lactobacillus delbrueckii
  source 1..1525: mol_type = genomic DNA
agagtttgatcctggctcaggacgaacgctggcggcgtgcctaatacatgcaagtcgagcgagctgaattcaaagatcccttcggggtgatttgttggacgctagcggcggatgggtgagtaacacgtgggcaatctgccctaaagactgggataccacttggaaacaggtgctaataccggataacaacatgaatcgcatgattcaagtttgaaaggcggcgcaagctgtcactttaggatgagcccgcggcgcattagctagttggtggggtaaaggcctaccaaggcaatgatgcgtagccgagttgagagactgatcggccacattgggactgagacacggcccaaactcctacgggaggcagcagtagggaatcttccacaatggacgcaagtctgatggagcaacgccgcgtgagtgaagaaggtcttcggatcgtaaagctctgttgttggtgaagaaggatagaggcagtaactggtctttatttgacggtaatcaaccagaaagtcacggctaactacgtgccagcagccgcggtaatacgtaggtggcaagcgttgtccggatttattgggcgtaaagcgagcgcaggcggaatgataagtctgatgtgaaagcccacggctcaaccgtggaactgcatcggaaactgtcattcttgagtgcagaagaggagagtggaactccatgtgtagcggtggaatgcgtagatatatggaagaacaccagtggcgaaggcggctctctggtctgcaactgacgctgaggctcgaaagcatgggtagcgaacaggattagataccctggtagtccatgccgtaaacgatgagcgctaggtgttggggactttccngtcctcagtgccgcagcaaacgcattaagcgctccgcctggggagtacgaccgcaaggttgaaactcaaaggaattgacgggggcccgcacaagcggtggagcatgtggtttaattcgaagcaacgcgaagaaccttaccaggtcttgacatcctgcgctacacctagagataggtggttcccttcggggacgcagagacaggtggtgcatggctgtcgtcagctcgtgtcgtgagatgttgggttaagtcccgcaacgagcgcaacccttgtctttagttgccatcattaagttgggcactctaaagagactgccggtgacaaaccggaggaaggtggggatgacgtcaagtcatcatgccccttatgacctgggctacacacgtgctacaatgggcagtacaacgagaagcnaacccgcgagggtaagcggatctcttaaagctgttctcagttcggactgcaggctgcaactcgcctgcacgaagctggaatcgctagtaatcgcggatcagcacgccgcggtgaatacgttcccgggccttgtacacaccgcccgtcacaccatggaagtctgcaatgcccaaagtcggtgagataacctttataggagtcagccgcctaaggcagggcagatgactggggtgaagtcgtaacaaggtaacc

SEQ ID NO: 8 - DNA, 1502 bp, unidentified
  source 1..1502: mol_type = genomic DNA; note = Limosilactobacillus fermentum
cggcggtgtgcctaatacatgcaagtcgaacgcgttggcccaattgattgatggtgcttgcacctgattgattttggtcgccaacgagtggcggacgggtgagtaacacgtaggtaacctgcccagaagcgggggacaacatttggaaacagatgctaataccgcataacaacgttgttcgcatgaacaacgcttaaaagatggcttctcgctatcacttctggatggacctgcggtgcattagcttgttggtggggtaacggcctaccaaggcgatgatgcatagccgagttgagagactgatcggccacaatgggactgagacacggcccatactcctacgggaggcagcagtagggaatcttccacaatgggcgcaagcctgatggagcaacaccgcgtgagtgaagaagggtttcggctcgtaaagctctgttgttaaagaagaacacgtatgagagtaactgttcatacgttgacggtatttaaccagaaagtcacggctaactacgtgccagcagccgcggtaatacgtaggtggcaagcgttatccggatttattgggcgtaaagagagtgcaggcggttttctaagtctgatgtgaaagccttcggcttaaccggagaagtgcatcggaaactggataacttgagtgcagaagagggtagtggaactccatgtgtagcggtggaatgcgtagatatatggaagaacaccagtggcgaaggcggctacctggtctgcaactgacgctgagactcgaaagcatgggtagcgaacaggattagataccctggtagtccatgccgtaaacgatgagtgctaggtgttggagggtttccgcccttcagtgccggagctaacgcattaagcactccgcctggggagtacgaccgcaaggttgaaactcaaaggaattgacgggggcccgcacaagcggtggagcatgtggtttaattcgaagctacgcgaagaaccttaccaggtcttgacatcttgcgccaaccctagagatagggcgtttccttcgggaacgcaatgacaggtggtgcatggtcgtcgtcagctcgtgtcgtgagatgttgggttaagtcccgcaacgagcgcaacccttgttactagttgccagcattaagttgggcactctagtgagactgccggtgacaaaccggaggaaggtggggacgacgtcagatcatcatgccccttatgacctgggctacacacgtgctacaatggacggtacaacgagtcgcgaactcgcgagggcaagcaaatctcttaaaaccgttctcagttcggactgcaggctgcaactcgcctgcacgaagtcggaatcgctagtaatcgcggatcagcatgccgcggtgaatacgttcccgggccttgtacacaccgcccgtcacaccatgagagtttgtaacacccaaagtcggtggggtaaccttttaggagccagccgcctaaggtgggacagatgattagggtgaagtcgtaacaag

SEQ ID NO: 9 - DNA, 1457 bp, Bacillus subtilis
  source 1..1457: mol_type = genomic DNA
gttagcggcggacgggtgagtaacacgtgggtaacctgcctgtaagactgggataactccgggaaaccggggctaataccggatggttgtttgaaccgcatggttcaaacataaaaggtggcttcggctaccacttacagatggacccgcggcgcattagctagttggtgaggtaacggctcaccaaggcgacgatgcgtagccgacctgagagggtgatcggccacactgggactgagacacggcccagactcctacgggaggcagcagtagggaatcttccgcaatggacgaaagtctgacggagcaacgccgcgtgagtgatgaaggttttcggatcgtaaagctctgttgttagggaagaacaagtaccgttcgaatagggcggtaccttgacggtacctaaccagaaagccacggctaactacgtgccagcagccgcggtaatacgtaggtggcaagcgttgtccggaattattgggcgtaaagggctcgcaggcggtttcttaagtctgatgtgaaagcccccggctcaaccggggagggtcattggaaactggggaacttgagtgcagaagaggagagtggaattccacgtgtagcggtgaaatgcgtagagatgtggaggaacaccagtggcgaaggcgactctctggtctgtaactgacgctgaggagcgaaagcgtggggagcgaacaggattagataccctggtagtccacgccgtaaacgatgagtgctaagtgttagggggtttccgccccttagtgctgcagctaacgcattaagcactccgcctggggagtacggtcgcaagactgaaactcaaaggaattgacgggggcccgcacaagcggtggagcatgtggtttaattcgaagcaacgcgaagaaccttaccaggtcttgacatcctctgacaatcctagagataggacgtccccttcgggggcagagtgacaggtggtgcatggttgtcgtcagctcgtgtcgtgagatgttgggttaagtcccgcaacgagcgcaacccttgatcttagttgccagcattcagttgggcactctaaggtgactgccggtgacaaaccggaggaaggtggggatgacgtcaaatcatcatgccccttatgacctgggctacacacgtgctacaatggacagaacaaagggcagcgaaaccgcgaggttaagccaatcccacaaatctgttctcagttcggatcgcagtctgcaactcgactgcgtgaagctggaatcgctagtaatcgcggatcagcatgccgcggtgaatacgttcccgggccttgtacacaccgcccgtcacaccacgagagtttgtaacacccgaagtcggtgaggtaaccttttaggagccagccgccgaaggtgggacagatgattggggtgaagtcgtaacaaggtagccgtatcggaaggtgcggctggatcacctccttt

SEQ ID NO: 10 - DNA, 8974746 bp, Bacillus subtilis (residues 1-1,794,950 of 8,974,746)
  source 1..8974746: mol_type = genomic DNA
aattacccgttcgaagagcttgtcgataagcttgaattgacacgagatatgagccggaacccagtgtttgatgcgatgttagttgttcaaaataatgattacgagccattgcatcttcatgatttgcaaatgaagccggcacaagtttctcatctcgtttctaaattcgatttgacactacaggcatctgagggcgacggaaacattcatttcctttttgaatattcaaccgcattgttcgagaaaaccaccattgaacgctgggcatcgcatttaacaaatgtacttagcatcatcggcaaaaacccgaaggtgacactcaaccatatcgacatcctgacccaagaagagcggcaccagctgcttaatgagtttaacaccgggcaagcgaatcaatacggagttcaaacaatcagtcaattgtttgagcagcaagctgcacgaacaccaaaagcttctgcacttgtcagcggagacaaaacactcacttatcaggagcttgacgagtggtccaatggaatcgcacgtgcattgcgcagccgaggtgttaagccggacacaccagtaggcatcatgatgcatcgttcgttcagtatgatagcatccatacttggtgtgtggaaagccggaggctgttacgttcccattgatcctgaatacccgaaagaacggaaacgctatatcctcagcgacagcggaacgaaactgctgatgacaataaatgaagcggatctgggagtacttgctgactttgaaggagagatcttgacgatagaaagcgtagaggaagacgacaaatcgccgctgccgcaaatgtcgtctgcccatcatttggcttatatcatttatacttcaggaacgacgggccgtccaaaaggggtaatggtcgagcataaagggattgctaacactcttcagtggcggcgaaacgcttatgcattcaacgagacagataccattctgcagctcttttctttctcatttgacggctttataactagtatgtttacaccgcttttgtcaggtgcaaaagccgttttgcttcatgaagaggaagcgaaggatattctggccattaagcatcagctgtctcgtcaacggattacacatatgattattgtgcctgttttatatcgagcgcttttggacgtagtgcagccggaagatgtaaagacgcttagagtcgtcacactggcgggagaagcggctgaccgcgaattgatcgcccgcagcttagctatatgtccgcataccgaactcgccaacgaatatggaccgacagaaaacagcgtggcgactaccgtcatgagacatatggaaaagcaggcatacgtaagcatcggccagccgattgacggaactcaagtgctgattttaaatagcaatcatcagcttcagccaatcggtgttgcgggagagctttgtatagcaggaacagggcttgcaagagggtacgttaatcttccagaactgacagagagagcattcacgcagaatccatttaaacccgaagcacgaatgtaccgaacaggagacgccgccagatggatggccgacggtacactcgaatatctcggaagaatcgatgatcaagtcaaaatcagaggataccgtgtagaaacgaaagaaattgaatcggtcatccggtgtataaagggtgtaaaagacgccgcagtagttgctcatgtaacagcgtcaggacaaaccgaattaagcgcttatgtggtgacaaaaccagggttgagcacaaatgctgtacgctcagaattacaaaacaagctgccggtgtttatgcaccctgcgtttattgaaaaactggactcacttccattgtcaccaaacggcaagctggatcgcggagcacttccaaaacctgtatacaaccacgaaggtgaacgtccattcctcccgccatccagcaaaatggaacaaatactggcagatatatggaaagaagtactgggggcagaaaagatcggaacagctgattcgttctttgaacttggcggagattcaatcaaagcgttacaggtatctgcgcggcttcaccggataggcaagcaaatggcagtgaaagatttgtttagccatccgaccattcaagaattggcagcttatatccgtgattcagatacaagttccagccaagctgcggttgagggagacgtacaatggtcgcctgttcaaaaatggtttctttctcaagatataaaagaaaaacaccattttaatcagtccgtaatgctgcatcgaagcacctctgtacaagaagacgcactgcgaaaaacgttaaaagcaataacgtgtcatcatgatgcgctgcgaatggtgtttacacagaatgaacaaggaaagtgggatcaatataatcggccgctcagtcattcggacgacgcgttgtacggccttcagatgattgatttgtcagctccggacggcactgatggaaatagaccgtatgaacctcttatcaagcgccatgtacttgatattcagcagaaaatggatttgaagaatggtccgctgctgcaagccggtcttttccacacaattgacggtgatttcttatttttatctgctcatcacctcgtcgttgacggcatctcatggcgggttctgcttgaagatttggctttagggtatcgccaagctgctggcggggaggatatcaaactgccgcctaaaacaagctcgtttaaagcgtatgcgaaaaagctctctgactacgctgaaagccagcagctaatgaaacagctcaagtattggcgcgaagccgaagagtatcaaacagaggcattgccttttgatcaaatcgatggaactagagcacacgagggacaacggtccacaatttcgtttaccttaaacgataaagagacagcagcactcttaaaagacgccaacagcgcatataacactgatacgcaggacatgctgctcgcttctgtcattcttgcgctgcgccattggaccaatcaatccgccttcaaactatcattagagggccacgggcgagaggatgtattaaaaggaatagatgtgagccggacgattggatggtttaccgccatttatccgttattgattaaactgaacgcagacttgccagattcggaagaaagcatggttcatgtgctaaaaacaacaaaagatacactgagacgtgtacctgacaaaggattcggctacggtgtcatcaaatatttgactccgcctggcaaaaaagacatcaatttcacaggtgcaccagaaatcagctttaattatcttggtcaatttgaaagcggccgcacagctgaagtacctgaggaggacgccttctcattctctccgctgggtgccggaggtgatatcagcacaacatggaaccgtgaacagtcgctggatatcagcgcaatcgctgcagaaggaaaattgactgtcaatatgacttatgacaatgcccgctttcagcgcaaaaccatcgaacagcttagcgaaacatgccgtcaatttttattacagctgatcgaacactgccagaacaaaagcgaaacagaaaagacgatcagtgattttgatgatcaagaactgaccgaggacgccctgcaagagatcgctgatatgctcagttttcactaatgaatccgtgaagaaaggtgcagacactatgaataccattaaaaaaatcaagaacatttatcctctgagtcatatgcaggaagggatgctgtttcattccttcctccgtaaagaggagggggcgtatgttgagcagtcgctcttcaccattaaaggaagcctcagctatgactggttccagcgcagcattcaagccattatcgaccgccatgatattttcagaaccgtgtttttgccgcacgtcccgcatttgtcgggacctcggcaagtcgtgatgacagaacgtgaattccatttgaacagcgaagacatttctcatctgccgacaaacgaccagaatgagtatattgaacgctttaaagagaaggacaagcaaaaaggctttgatctgcaaaaagacatgctgatgcggatttctctattcaaaacagctaaagatgagcatgtctgtatctggagtcaccatcacattttaatggacggatggtgcctaggtatcgttatgcaggaatttatgcaaatttatcaatcgattcatgcaggaaaaccgctttcattagaccctgtccgtccgtacagcacctatatttcatggctgacaaaccgagacaaagaaaaagcagcggcctactgggatacctatttaaaaaactacagcgctccatcacctctgcctcgtgtgtctgataaagaaacaaaagaaagttatcaccgtgaagatttgatattttcattaaataaaccactgacagacaagctgaaagagactgccaaacaacacggcgtcacgctcgctacccttattcaggcagtctggggtgtgatgctgcagcaatataaccgcacagacgacgttgtgtttggcgcagttgtatcaggaagaccgtcagaaatcccaggcgtggagcaaatgatagggttgtttatcaataccataccgattcgaattaaaacacaccaagacgaaacgtttcacgagctgctcatacgctgccagaaagaaatgctggaagctgagccgtttacctgccagcctttatttgatattcaggcaaacaccgcattaaaacaggaactgattgatcacattatcgtctttgaaaactatccgttacagcagaaaatcgccgattccgctgatcaaaccgattcaccgctgcaaatcgatcaagttcaagtatccgagcaatcaggatataactttaatcttgtcgttgctcctggcgaagagcttgtcatcaagttcagctataatgcattcgtttacgatgctgcctggatcagctgtatcaagaggcaatttacgcaagcgcttagcacagctgcacagcaccctcatatgccaattgctgatttttcttttcttgatgcaacagaaaaagagcagattgtcacacagttcaacaatacaaaaacggagtatccaaagaatcatacaattatcgatttatttcgcgaacaagcagaaaagacgccagaccataccgcacttgtgtatggcaatatgtctatttcgtataaagagcttgataaacgctctaatgcgctcgccagagagttaattcaaaagggatttcggaaaaacgagacagccggaatattggctgcacattctcccgaattcatgatcagtgtgcttgccgtattaaaagcagggggagcatacctcccgcttgatgcggagcttccgcctgaacgagtcagctttatgcttgaggaaacgcaggcaaaaatgctgattgttcaaaagggattggagcaaaacgctgcgttctcaggaacatgtatcatttcagatgcgcagggattgatggaagagaacgatatccctattaatatcagctccagcccggatgatcttgcgtacatcatgtatacctcaggatcaacaggccggccgaaaggggtcatgatcacgaatcgcaatgtcgtgtcccttgtcagaaacagcaattacacgtctgcgtccggtgatgaccggtttattatgactggatctatcagctttgacgccgtcacctttgaaatgttcggggcacttttaaatggcgcaagccttcatatcattgataaatcgacaatgctgacacctgatcggtttggagcgtatttgcttgaaaatgacattacagtgctatttttaacgacagctctttttaatcagctggcacaggtacgagctgacatgtttcgcggactccatacgttatatgtcggaggagaagcactctctcctgccctgatgaatgccgtcagacacgcctgtccagatctcgcgcttcataatatttacgggccaacggaaaacacgactttttcaaccttttttgaaatgaagagagactatgcggggccgattccgattggaaaaccaatcagtaatagcaccgcttacatcttagatacaaaaggacgtcttttgccaataggcgttcccggcgagctttgtgttggcggtgatggagtcgctaaaggctatttgaacagagtagatctgacaaatgctgtgttttctcctcatcctttcttgcctggagaaagaatataccgtactggtgatttggcgcgctggctgcctgatggaaacttagaatacatcagcagaattgacaggcaaatgaaaatccgcggaaaacgaattgagcctgccgaaatagaagcgcgcctgttagaaatggaaggcgttcaagaagcagcagtgacattgagagaaaaagatggagaggcgcagctgtacactcattacgtcggtgatcacaaaaaaacagatacggattttcgcgccgatttggcgcgtgtgcttccagactatatgatcccgcagcactgggtgcgtgtggagcggatgccgcttaccggaaacggaaaaatagaccgcagcgcgctgcctattccagaaaataagcctgccaaacgacagaacatcatattgccaagaaacttggttgaagaagaattggcgaacatttggaagcaagtcctcggtgttaacacaatcagtattgatgatgacttctttgctattggcggacattcactaagagcactgcaagtcatacatacactaaaacatcagcagaacattgacataccgattgatttcttgttcgaacatccgacaatcgctcagcttgccgaaaaactttattctaaacagctgacagcagcaaatgaacagcatgtgatcaaactgaaccagcacggcgcgcaaaatcttttctgcttcccgccgatatcgggatttggcatttattttaaagaccttgctttattgctgaatgagaaggcagccgtatacgggtttcactttattgaacaagacacccgcattgaacaatatgttaattgcatgacggacatacagcctgagggcccatacgttttattaggctactctgcaggcggaaacctggcttttgaagtggcacaggctatggagcgcaaaggattagaagtcagcgacttcattatcgtggacgcttatctaaaagaacagcctttgcctatcgataccggtaatgacgaatctgcagcatatctgcctgaagcagtcagagaaaaggtgatgaagaaaaaaagaaactatcaggaatattgggcacaattgctgaatgaaggccacatcaaagcaagcattcatttcatcgaagctggaatccaccccgaaaccagcgggcatacaggcttaacgaaatgggaaggcgcctgcggaaactatagtgagtacacgggttttggcgctcataaagacatgctggaaggaacatatgctgaaaagaatgccgacatcatcctcgacattttagaaaagatcacttcaaatcaagtaatactgcacaaacgataaagcggattagcggacagaggccattctctgtccgtctttctttttgtatcaagaatggataagggacacttgggaatgataacatcatcctttttcttggaggcttctcaatggaccgtctttcttttctaacttttatcatgctgattctagccagttacaggctgacacatttgattgtatttgacaaaatcacagaatttatccgaaaaccttttatgaaaaagaaaaggattgttgatcaaaacgggcatgtagatgaaaaaagcgtgccggcttctaactttggatacatgctcaattgctactggtgtgccggtgtttggtgtgccatcttgatcggacttggctatctttttttgcctcgtattgcaataccgctgatctttattttagccattgccggagcacaagcgatccttgaaacggctgtcggtgtcggcgtaaaacttattgatgtgttaaaaagtctgcaaaccatgatgaatgataaaaagtcctaaaagcggttcacaacatgctttaggacttttttcgtttatttagtgagatagacattctgttaatcacccttttatagcccgggaataccgtaatagcgaatagtgaaagtgatgtaatgggggagaagaaacagaatgaaggtttgccaaaagtcgattgtccgtttccttgtcagcttgatcatcggaacgtttgtcatttccgttccgtttatggccaatgcgcagtctgacagggagctgagagccgtatggattgcttccgtattaaatattgattggccgtccaaaaaagggttatctgtgaaagagcaaaaacaggagtatatcaaactgctggacgatgtgcaaaaaatgggaatgaatgccgttatcgttcagattaaaccgacggctgatgccttttatccgtcagcttacgggccttggtcggaatacttaaccggtgtccaagggaaggaccccggctatgatcctcttgcatttatgattgaagaaacccataaacgaaatttggaatttcacgcgtggtttaatccttaccgtattacaatgaatcatacagatcttaataaattgtctgaggatcacccggcaagaaaacatccagattgggttgccgcctatggaaaccagctgtattatcatccaggcattccagaagcgagagattttatcgtcaaaggcattgaagaagtcgtaaaacattatgatatcgatgctgttcatatggatgattatttttacccttataaaatagcgggacaggaatttcctgatcaagcacagtacgaacaatacggaaaagacgctttttctaatatcgatgactggcggcgggacaatgtgaaccagcttgtcaaacaaatcaaccaaacaattaaagctgcaaaaccgtatgtcaaattcggcatcagtccctttggagtatggagaaacgccgcagatgacccgaccggatcgaatacaaaagcaggcgtcagaaattatgacgatctatatgcagacacaaggcattggatccaagaaggcgacatcgattatattgctccgcaaatttattggagtatcggctttaacgcagcggcttacgacgtgctggctgattggtggagcaatgaagtcaaaaataggcctgttcacttatatattggccaggcagcatataaaatcaataacaattttgatccgccttggtccgatcctgaggaatatgtgcggcaaatcactttgaaccgccagcttgaactggtgaaaggaagcatgcatttcagcctcaaggacctcaacaaaaatccgcttggcatcaaagacagtctcagcaccgatctttacagcaagccggcactggttccgcaaatgccttggcttgacaataccgccccaaaaaaaccgaagcttacgaaagtcaccgaagacaaaaacggcaatcttctgcagattaaagatcacccatcaaatcaaaaaacgaaagaaacagcctattatgcgatatacagagccgaagggaaaaagcagagaacattgctggcaacgcaaagaaaaacacatgagcagcaaaccttcttagataacacggcagatcccaacaagaaatatacgtattatgtcacttcagcagaccggcttcataacgaaagcaaagcttccaaacgaacaacaaaataagaaatgagaaggacggctttctaagtcgtctttttttaaaaagtgattttgggacaggaaacgatggtaaaccgctgaattttttaaaaaacaaaggtgagattcacatgaatatggaggcggtgtttggacatttaccattattggaatctgagaaactagtactaaataaaaataaaatcgaagagaaacacgtacaggacgtgttttacgttttcatttctagtctggttaggtgccacattattttttgtgctgttcggagatgctgtgttgactgatccggctgaagaagcctttttgccgaactttcttctcttgggagcgggcactgctcttgttttatgccttgtgttctttctctatcaaaaactcgatcaatcacagttcgcggtgatcaagctaggtatatggggatcagcggtcggtttattgatggatacgatttccctttggaatcttcccctcatcttcccggctttatcaaagggccaagttattgcgtttacgatatggatggtatgcgcctactgcatgtatttgctcatcccgctgatattatcacataaaaaatgattcagttttaattttcagacttttcttgtcagggaatgattatagaactcgcctaataggatgttacaaagatgtgaaggaggaaacgatgtgaattttgagctgacaaaagaacaacaaatggtgcgtgaaatggtaaaagattttgcgaaaaaagaaattgctcctcacgctgaacatgtagatcaaacaggcgagttcccgatgcaaacatttaaaaaaatgggtgaactcggtctgatgggtattccatttccagaagaatacggcggatctggcggtgatacgatttcatatgccttagcggttgaagaagtcggcaaagcctgcggcagtactggattaagctatgctgcagcggtctcgctaggcgcaagccctctttactacttcggaacagaagagcaaaaacagacgcatttgacgccgctggcttcaggcacagcactcggatcattcggcctgacggagccaaatgccggctcagatgcaggaggcactcaaacaaaagcgatttcaaatggtgacgagtatgtaatcaacggcgaaaagtgctggatcactaatgcaagctacgcacgcacagttattgtaaccgccgtaacaggcaaaaacaaagacggaaaaaacatcatctccgcattaatcgtgccaactgacacaccaggacttacgattacgagcccgtacgataaaatgggcgtccgcggttcgaatacagcggaaatcttgcttgaagatgtaagagtgcctgcggccaacttacttggcgatccaacaaaagggtttaaacagtttctatatacgctggatggtggtcgaatctccatcgctgctcttgcagtcggcattgcccaagcggcccttgacgcatcattggcatatgcgaaagagcgaaagcagtttggacagccgatttcttcctttcaagcgattcaatttaagcttgctgacatggcgatggaaattgatctggcacggcaaatggtgttaaaagccgcctggctgaaagatcataaccgcccgttcaccaaagaagcggcgtacgccaagctattcgcatctgaaatggcgacaagagcttgcaatcaagccattcaaatccatggaggttcaggctatatgaaagagtatggggtggaacggatgctgcgggacgcaaaattaatggaaatcggtgaaggcacatctgaaattcagcgtctcgtgatcgccagacagcttttaaaataaaaatgtaaacgctttcctatcattaagaaaggaggaacaatgaatggctgaactcatccattccacaatcggcaggctgctggaacaaacagctgatgcgtatcccgatcgagatgctgttgtgtatccagaccgaaatatccgctatacgtacgctcaatttgacagtctgtgccgtcaaaccgctaaaggtctcatgcggatggggattggaaaaggagaccacgtcgccatatgggcttctaatatctctgaatggcttgccgtccagttcgcaactgcgaagatcggagccgtgctcgtgaccgtcaataccaattatcaagcacatgagcttgattacttgttaaagcaatcggatgccgcggcgcttattatcatggattcatacaggggcacttcttatccagacatcgtgaacagtttaattccagaactgcaagaagcaaagcccggccaactgaaatctgaacgctatccctttttaaaaacgctgatctatattggcaataaacgattgtctggcatgtatcattgggacgatacagagatattggcgaaaacagtgacagatgctgagcttgaagagagaatgaacagcctggataaagacaatgtgattaatatgcaatacacatcaggaacgacagggtttccaaaaggcgtgatgctgacccatttcaatgtcatcaataacgctgctaatatcgctgaatgtatggctttaacctctcaagaccgcatgtgcatccctgttccgttttttcactgctttggatgcgtccttggggttttggcatgtgtatccgtcggggcagccatgatacccgtgcaagaatttgatcccgttaccgtccttaaaacggtagaaaaagagaaatgcacagtgctccatggtgtgcctaccatgtttatcgccgagctgcatcatccggattttgatgcatatgatctatcgacgctccgaacaggaatcatggccggctctccctgtccaagtgaagtgatgaaagctgtgattgaaaggatgggcatgaaagacattacgatcgcctatggacaaaccgaagcctcgccagtcattacacaaacgagagcaaatgattccttcataagaagagtcgaaacaaccggccgtgccctgccacatactgaggtgaaaattgtagaacccgggacatgtcaagaagttcaaagaggcatgcagggagaactgtgcacccgtggctatcacgtcatgaaaggctattataaagacaaagatgcgaccagaaaagcaatcaatcatgacggatggctgtttaccggagatcttgctgtcatggatgaagacgggtactgccgcatcaccggaagattaaaagatatgctcatcagaggcggcgagaacatttatccgcgggaaattgaagaatttttataccagcatcccgctgttttagatgtacaggtggttggtgtgcctgacgccaaattcggggaggaagctgcagcctggattaaactgaaagacggtaaaagcgtttcacctgatgagcttaaagcctattgcaaagggaaaatcgcccgccacaaaattccgcgttatgttatttttacggatgactatccgatgacggcctcaggcaaaattcaaaaatataaactgcgagaaaaaacgattgaaatgttcaacttatcatcaagtcaatgaggtgaaatcatgtttacaaaagtactgatcgccaaccgcggtgaaattgcaatgagaattatccgaacatgcagccgtctcggcattaaaacggtcgctgtttattcagaagcagacaaggacgcgccccatacaaaagccgctacagaggcatatttgatcggggaatcgagagtcagtgaaagttatttaaatatagagagaatcataaagacggcgaaaaaagcaaaagccgacgcgatccacccgggatatggattgttatcagaaaacagccggttcgctgaacgctgcaagcaagaaaacatcgtgtttatcggaccttcccctgatatcatcgcaaagatgggcagcaaaattgaagcgcgaaaagcaatggaggctgcaggtgtccctgtggtgccgggcgtttctgaatccctcggagatatagaggcagcctgccgcaccgcaagtcaaatcggctatcctgtcatgctgaaagcttcagcgggcggaggcggcatcggaatgcagcgtgttgaaaatgaagaagcattaaaaaaagcgtacgagggaaacaaaaagcgcgcagcagattttttcggtgacgggtctatgtatatagaaaaagttattgaacatgcgcgccacatcgaggttcagcttttggccgatcaacacggccatacagtacatctgtttgaacgtgattgctctgttcagaggcgccaccaaaaagtcattgaagaagcaccgtctccatttgtagacgatgaactaagaatgaagatcggtcaaacagcggtaaaagcagcgaaggcaatcggctatacgaacgcaggcaccatcgaatttatagttgaccagaaacaaaatttttatttcctcgaaatgaatacgagactgcaagttgaacaccccgtgactgaagaaataacaggcctggacttagttgagcagcagctgcggattgctgcgggccatacactcacattctcccaaaaagacatccaacggaacgggcatgcgatagaggttcgaatatacgcggaagatcccaagaccttcttcccgtcaccaggtacgatcactgcgttttcacttcctgaccaaaaaggagtcagacacgaatgtgcggtagcaaaagacagcaccgttacccctttttatgacccgatgatcgctaagatgattgtcaaaggccaaaccagaacagaagcaattgaaaaactagagacagcgcttcgcgactatcgtgtagagggaatcaaaacaaaccttccgctcctcatacaggctgcggcaacaaaggcatttaaagaaggggatgtcacgactgactttttgaaacagcacctataaaggaggcagttgtcatgacggttagcatacaaatggcaggaaacctgtggaaagtccacgtcaaagccggcgaccaaatcgaaaagggccaggaggtagccattttggaatcgatgaaaatggaaatcccgatcgttgcagatagaagcggaatcgtaaaagaagtcaaaaaaaaggaaggcgactttgtaaatgaaggagacgtactgctcgaactgagcaattccactcaataatttggaggaagaccatgccatatcctaaaaaagtgacaatcaaagaagtcggcccgcgtgatggcttacaaaacgagcccgtttggatcgcaacagaggataaaataacctggatcaaccagctttcccggacagggctgtcgtatattgaaatcacatccttcgttcacccgaaatggattccggcgcttcgagatgctatcgatgtagcaaaaggcatcgaccgagaaaaaggggtaacgtacgcggcacttgtcccgaatcaaagaggactggagaatgcacttgaaggaggcattaacgaggcttgcgtttttatgtccgccagcgagacgcacaacagaaaaaacatcaataaatccacttctgaatccctccatatactcaaacaagtaaacaacgacgcacaaaaagcaaacctcacaacaagagcctacctctcgactgttttcggctgtccgtacgaaaaagatgtccccattgaacaagtcattcgcctttcagaagctctatttgaatttgggatttctgaactgtcgcttggagatacgattggagcagctaatcccgcccaagtggaaactgtacttgaagctcttttggcacgattcccggctaatcaaattgccctgcattttcatgatacgagaggaaccgctctggccaacatggtcacagcactccaaatgggcatcacggtgttcgacggctcggcaggcgggcttgggggatgcccatatgcgccaggttcatcaggaaacgccgcaactgaggatatcgtgtacatgcttgaacagatggatatcaaaacaaatgtaaagctagaaaaactgctatctgcggccaaatggattgaagaaaaaatgggcaaaccgctgccgagcagaaatttacaggtgtttaaatcatcttgataaaagggaggacgcatacaatgggagattctattctttttactgttaaaaatgaacatatggcgttgatcaccttaaacaggcctcaggcagcaaatgctctttcagcggaaatgcttagaaacctgcaaatgattatccaggaaattgaatttaactcaaacatccgttgcgtcatcctcacaggcaccggtgaaaaagcgttttgtgcaggggcagacctgaaggaacggataaaactgaaagaagatcaggttctggaaagtgtatctctcattcaaagaacggcggctttacttgatgccttgccgcagccggtcatagctgcgataaatggaagcgcattaggcggcggactagaattggcattggcatgcgaccttcgaatcgcaactgaagcagctgtgctgggacttccggaaacagggttagctattatcccgggcgctggagggacccaaaggctgccccggctgattggcagaggaaaagcaaaagaattcatttatacaggcagacgcgtgaccgcacacgaagcaaaagaaatcggccttgtagagcatgtcacggctccttgtgaccttatgccaaaagcagaggaactggccgcagccatttctgccaacggaccgatcgctgtccgtcaggctaaatttgcaatcaataaaggattggagacagatcttgctacaggccttgcgattgaacaaaaagcgtatgaacaaaccatcccgacaaaagacaggagagaagggcttcaggcctttcaagaaaaaagacgggccgtatacaagggaatataaaagggaggcaatgctgatggattatgaaaaggaacgaacagaacgggctgaacggattcgaaaaggcggagcggaaaagtatcatcaaagcaatcgggaaaaaggcaagctctttgtcagagagcggctttcccttctctttgacgatgacattgagctagaagacgctttttttgcggaatgtatgtcagacgggcttcccgctgacggagttgtaaccgctatcggcaaaatcggcggccaaaccgtttgcgtcatggcgaatgattcaacagtgaaagcggggtcatggggagcaaaaacagttgaaaaaatcatcagaattcaagaaatcgccgaaaaattaaactgtccgctcatttatttagtcgattcggcaggcgcccgaattaccgaccaaatcaatgtctttccagggagacgcggtgcaggaagaattttttacaatcaagtcaaattatcgggacgcattccgcaaatctgtctgcttttcggaccatctgcggcaggaggcgcttatattccggccttctgtgatatcgtcgttatggtagacggtaacgcctccatgtatttaggttcgccaaggatggcggaaatggttattggagaaaaagtgtctctcgaagaaatgggtggcgcccgtatgcattgctcaatctccggctgcggagatattcttgcagaaactgaagaagaagccatacagctggtgcgggcttatttgtcttactttccggcaaattttcaagaaaaagcgcccattcatgagaaacgcccgccaaaacacttcgaaactccgcttgccgacgtcattccgcaaaatcaaaacgcaccttttgatatgcatgagctcattgagcgggtcatagatgaagactcattttttgagatcaaagccttatttgcaccggaattattgacgggcctcgcacgaatccacggacagcctgtcggcattgttgcaaaccagccgaaggtaaaaggaggcgtcttattccacgattcagcagacaaagcggctaagtttattaccttatgtgacgcttttcatatcccattgctgttcttagccgatatccccggttttatgattggcacaaaagtagaacaggctgggattatcagacacggagcgaaaatgatttctgcgatgtcggaggcaactgttccaaaactctctgtcattgtccgaaaagcttacggggcggggttgtatgcaatggcagggccggcatttgaaccggattgctgtctagcgctcccaaccgcccaaatcgccgtcatgggccctgaggccgctgtaaacgctgtctacgctaaaaaaatcgccgagctgccagaagaagagagagccgcatttatcagcagcaaacgggaggaatacaaagaggacatcaatatctaccgtctggcttcagaaatgatcattgatgctgttatcccagccaattcgctgcgtgatgagctggccaaacggctcaaggcatacatgacaaaggaaatgacatttaccaatcgaaagcatccggtttatccggtgtaaaagcaagaacttaggagcgcaaaaaaagcgctcctttatatatttacaataacaacattatgtcaactaattaccattgcataaaacgcttggttttttagaatagtaaataaaggctgccgcacctctagcggcaattgtcagtttatcataaaaaggggcctacattatgtatcatttatattcacataacgacttggacggagtaggatgcggaatcgtagcaaaattggcgttcggaaaagacgtagagatccggtataactctgtcaacggcttaaacgcacaggtgcagtactttttagaaaaagcgaaggagagcaacagacaggacgcgttattcatcaccgatctcgccgtcaatgaagaaaacgaagagagattgaatgagtatgttcatgcagggggcaaagtgaagctcattgaccatcataaaacagcccttcatttgaatgagcatgaatggggatttgtccaggtggaatacgatgatggaaggctcacatccgcgacatcgcttttatatggctatctcattgaaaatggcttcatgaaaccgacaaacgccttagatcaattcacagagctcgtccgccaatacgatacatgggagtgggagcggtacgatcaaaaacaggcgaagcggcttaatgatcttttctttttgctgtcaatcgatgaatttgaagcaaaaatgatccagcgcctttccacgcatgacgaatttttcttcgatgattttgaagaaaaactgcttgatttagaagacgaaaaaatcgagcgctacctccgcagaaagaaaagggaaatggtacaaacctttgttcacgaacactgtgtaggcatcgttcacgctgaatcgtaccattcagagctggggaacaggctagggaaagataacccgcacctcgattacattgcgattttgagcatggggtcaaaacgagtcagtctccgcaccattcatgattacatcgatgtgtcagaaatcgccggccgatatggcggcggagggcatgcaaaagcgtccggctgttcaataaccgatgaagtatacgagttgtttgtagctgaagctttccgtattgatcctgtacggccggatgccttccgtaacatctataatctaaagggatctgcgaatggatcattatatgaaaatcgcgcacaaatgagattttttcttttccctttagacaacgaatggaatattcaaattaacggagaaacccaagacgaaacattcgcagcgtttgaagaggcagaatggtttattaagagaaattatgccgcatcgctcgtgcgggatgaagtgtttgtcgcatttttagcggagaatctgaagctggcaaatcaacatcgcaagtaaaaaaatatgcataggggagcgtcagtcacccctatgcatatccgctagctatcgtttaaatatggctgtacgtttcttaatcacaaaataaagggctatcacgacaacagccaatatcataatcggtgttgtataagtgcctgctatattctcaacatcatcccactggcttcctagctgtatgcctaaataaacaaacaggatagaccatggaatgatagcaagcacagtcagtaccacaaatttgagaaaaggcattctggcaatacctgccggaatggatatggcatgtctgacaaccggtataaaacgagccgagaagacaactccggcgccgtatttctgaaaccagttttccgacatatcgatatgatgctttttaatcaataaatacttcccgtatttgtccagaaatggcctgccgccatagcgaccgatccagtaaataaagatctgggcaatggtgcccccgataacacccgcaataattgcgccaataaatccaatcgtgccctccgataccatatagccgccataagctaatacaatctcactcggaatgatttcaatcattaacccaatcgcaatacccgcatatcccatgttcgtcagccatgttaaaatttcgcttatcaaactgcccacattcttcacaacctgtcctaatctttttcactattatatgactgattgacgagcaagatggttacaatttttttaccgcagcatttctttcgtttcccgtttgatcacatcttctaaataggccaaaagctgagatctcatttcgggacgcattaagccgatttcggtgctcgctttaaaacagcccagcttatcgccaatgtcatatcgatttccttccagcagccgggcatggatcggctccttacggcaaacctcacgaagcgcatctgtcagctgaatttcgttgcccgcgcctctgccaattgtcttcaaaacggagaagatcgaagaattcagcacataacgtcccattactgcgatttccgaaggtgcttcttcaggagaaggcttttccactaaatcgttcacttcatatacatgcccttgagaccctgatgtatttataataccatatttgctgacatcctcagggagaactgactgtacaccgacaacctctgtgccataaacgtcatatacatccattaattgccgaagagccggtgtttcagacaccataatatcatcacctaagagaacagcaaaaggctcatctccgataaaatgctccgcacacagcaccgcatggcctaatccgagcggttctttctggcggatgtaatgaatgttggccaaatcggcaatctgctgcatttccttaagtgtctccgtcttgcctttttcccggagattgaattccaattccgccgaccgatcaaaatgatcttcaatcgagcgtttgtttctccctgtaataatcagtatatcttcaattcctgactctgcggcctcttctacaatatattggattgctggtttgtcgacgattggaagcatttctttaggctgcgcctttgtcgccggcagaaatctcgttcctaaacccgctgcgggtataaccgcttttctcactttttttctcattcatcttcactcctgatcctgtatgtttttcagcgaatctccaaatacccagattcggtttccgataaaattcatcatcattccgccgatagtggcggcgagcttactcaccaaaagcgagcagccgcaattttgaaacaaataaagcagcaaaaaggtgatccctgacgcggcaatattaatcatgagaaaacgcacgatctctttcccgtcagccttacgtttcacacaaaacgtccaattccggttccacacatagctgttgacgatacctgcagtataggagcagatctgcgccggcagataagagacatgacaagcggtaagaagaaagaagacaccaaaatctatcagcgtattgccgacgcctacggtgcaaaaacggcctaatgtctttattttttctttcagcgtaacgaacctcccttcataaaagatgcgagtggcagtcatatttgttgatatggattactatagcggacagtgttgaataaacaattaataaaatatgaacaaaacatgaaaaagcgggtataccgctcaatagtcttatactcttgaaaaaaacagccgcattgaacggctgttttttgtgtctgaaaacatacaaatataaacggagtgttagccccatcttatcaatgaataaatgtatccagttcctttgtagaatcgaacactaactcctccaaaagtttctatacacaatttttttaatgatgtaggatgttagataaagggatatcttggataatgatgtaatctccgttcaatgtgattagtgggaggccatgaacaatcctgtctttttattttctggacaatggtcgctaggaatggggaagtttttttgaacaattttgaaggagtggtgcgatctcctcgaagaaaagagagaatggagacacatgaagatgagctttcagaacaactgggaacattgctaaacagcttccggctactttatgcgtgcaatcttcgtgacctgttgttatcaaattccaaaagaaaatcccccattttaaggaaaaaggaggatgtgaagtgatgaggaaaaagtgtagcgtatgtttatggattctagttttattattgagctgcttatctgggaagtctgcgtatgctgccactagtactacaattgcaaaacatatagggaattcaaatccgcttatcgaccatcatttgggagcggatccggttgcgctgacctataacggaagagtctacatctatatgtcaagtgatgactatgaatataatagcaacggaacaattaaagataattcatttgccaatttgaatagagtattcgtcatatcttcagcggatatggtgaactggacagaccacggagccattccggtagcaggtgccaatggagctaatggaggccgtggaattgcaaaatgggcaggtgcgtcatgggcaccgtcaatcgcagttaaaaaaattaatggcaaggataaattcttcctttatttcgcaaacagcggcggaggtatcggggttctcaccgcagacagcccgattggtccatggaccgacccaatcggaaaaccgctcgtaacgccaagtacgccaggaatgtctggtgttgtatggctttttgatccggcagtatttgtagatgacgacggaaccggttacctgtatgccggcggaggcgttcctggcgtttcaaatccaacgcagggacaatgggccaatcctaaaacggctagagtcataaaattggggcctgatatgacgagtgttgttggaagtgcatctacaattgatgcgcctttcatgtttgaagattcgggattgcacaagtataacggaacatattattactcctattgcatcaatttcggcggcacgcacccggccgataaacccccgggtgagatcggctacatgaccagttcaagtcccatgggtccctttacatatagagggcacttcctgaaaaatccgggtgcatttttcggaggtggcggaaacaaccatcatgctgttttcaattttaaaaacgagtggtatgtggtgtaccatgcgcaaactgtcagttccgctctgttcggggccggcaaaggataccgctctccccatattaataagctggtgcataatgcagatggatctattcaagaggtagcggcaaattatgcaggtgtaacacaaatttccaatttaaacccatataaccgggtagaagctgaaacgtttgcttggaatggacgcattttgacagagaagtccacagcacccggcgggccagtaaataatcagcatgtaacaagcattcaaaatggagactggattgctgtaggaaatgcagacttcggagcgggcggtgccaggtcatttaaagcaaatgtagcatccactttaggcgggaaaatagaagtgcgcctcgacagtgcagacggtaagcttgttggaactctgaatgtgccttcaacaggcggagcgcaaacgtggagggaaatagaaactgcggtaagcggggcaaccggtgtgcacaaagtattctttgtatttaccggaacaggtacaggaaacttgtttaattttgattactggcagtttacgcaaagatagtactcgtaatgggaccgcttaaaaacgaggcgggtgaagtacgggccagcaccggaacagcccgccattatggatatgccatgcagattttttaataccgtaaaagacacatgacgaaggagaggaataaatgattccacgcataaaaaaaacaatttgtgtactattagtatgtttcactatgctgtcagtcatgttagggccaggcgctactgaagttttggcagcaagtgatgtaacagttaatgtatctgcagagaaacaagtgattcgcggttttggagggatgaatcatccggcttgggctggggatcttacagcagctcaaagagaaactgcttttggcaatggacagaaccagttaggattttcaatcttaagaattcatgtagatgaaaatcgaaataattggtataaagaggtggagactgcaaagagtgcggtcaaacacggagcaatcgtttttgcttctccttggaatcctccaagtgatatggttgagacctttaatcggaatggtgacacatcggctaaacggctgaaatacaacaagtacgcagcatacgcgcagcatcttaacgattttgttaccttcatgaagaataatggtgtgaatctttacgcgatttcggtccaaaacgagcctgattacgctcacgagtggacgtggtggacgccgcaagaaatacttcgctttatgagagaaaacgccggctcgatcaatgcccgcgtcattgcgcctgagtcatttcaatacttgaagaatttgtcggacccgatcttgaacgatccgcaggctcttgccaatatggatattctcggaactcacctgtacggcacccaggtcagccaattcccttatcctcttttcaaacaaaaaggagcggggaaggacctttggatgacggaagtatactatccaaacagtgataccaactcggcggatcgatggcctgaggcattggatgtttcacagcatattcacaatgcgatggtagagggggactttcaagcttatgtatggtggtacatccgaagatcatatggacctatgaaagaagatggtacgatcagcaaacgcggctacaatatggctcatttctcaaagtttgtgcgtcccggctatgtaaggattgatgcaacgaaaaaccctaatgcgaacgtttacgtgtcagcctataaaggtgacaacaaggtcgttattgttgccatcaataaaagcaacacaggagtcaaccaaaactttgttttgcagaatggatctgcttcaaacgtatctagatggatcacgagcagcagcagcaatctacaacctggaacgaatctcactgtatcaggcaatcatttttgggctcatcttccagctcaaagcgtgacaacatttgttgtaaatcgttaagagcacaaagacacacataaataatagagtgtctgaattggcgattttccgattgggaaatcgcttttttattttgttgctgaattacaggaagaagaaaggatgtacataaaaacagcaaagctttattcttcatcttttctagtttacataatatatattctaggaagtaaacaaaataaataaatttctgtctcaatatcaaagtatacttaagttagtgagacagaaattgaaattttactgctgaatgacaaatcaaaaaaatggtgttgtcaatccataataaacggcttctaaatcttccagcgtcatatcgccatatgcgcatttgataacagaatcagcaaacacatcatagtcataatctgtagaaaatccttgctgcagctgtttttcgtaaacttcgatctgatctttttgatgctggatgtctttttccttacctggatagtcgggaccatttatcatattactcatttttttatacagcaccatatactgtttcagtatttcatccacaacgcaaacctcctattagatgataaaaacggacatcgttactgatgtccgccaaaaaaaagcttaactaatttggttctgttccccaaatcagttttccttgatcatataatgtgatttttttcgttgttttaaacgtatttgatttgaaaaaggaataatcgccgctttgtgcataattgctccagtcatcattgtgaagacggagctgaatattccctgtgcttgctcccggtgccaacgttccgtttttaaatccaagttccagataggtatctgcaccttgctttggtttatgcaacgtcacaaacttgtgtgtcacattgccgcatccaatctgcgcgtagtcacagtcaaagttttggcctttgtttttcgctttataccagtaacgggcagtgacatcttttaaatcaaccgtggtattgccgttattttttatttgaagctgcggacggatttggttgctgttcatactcccatcccctgctctgtactgtacagaaataccattttcctgtgtgggtttatcttttgatggcgtttcaggaatgtccttcgtcgaatctttggtgccgagaatgttttctctaacgaatgttcctgaagcagataaatctgacaaccgccagccgcctgttttagatgcccccggctttaaagctgaggatgattcctgcttatcagaaagattccagttcacccagctaatggtcttgctgtcgagatatttcagccattccctcgattgatcaaggaatacaccgccattgccagacgcgtcgcttgttccccactctgtcacaaaaataggtgctcctttgctgagtgcatagtttgctttatcccgtaaaaattggccgtgtgtgccggcataaaaatgaagtgcgtacataacgtttgcatcttttagctggtcatcggcagcatcattcacatcctggctccatgtaccggttccgacaatgatgatgttgtctggatcatttttgcggataactgaaatcacttcttccgcatatggtttaatatcacgcttccagttcacatcaccgtttggttcgtttgcaatttcataaatgacgtttggcgtgtttccgtaaaggcttgacatttccttgaagaattcttttgccttctctttattttggtttggattaccgtcatttaagatatgccagtcaatgatgacatatatcccaagctcttttgccgcttcaaccgcttcttttactttatttttcacggacgggttgtcaatataaccgccatctgccgtatacatcgctgcacggaaaacggtgataccccaatcatctctcagccattttaagctgtctttattgacatattctccataccattgcaatccgtgtgaactgatccccttcagctgtaccgctttaccgtctcggttaacgagctgtgtaccttttatgctaagctggccattcttggctactggcgtttttgtccctgctgctgatgccggcgaagctatcatgccgcccattgtcaataacgtaatcaataaacacgtaataaaaatagagattgaccgtttcatatctgatcttttcctccttcgcatcattttggctctacacttcttatgagcacgaactcattgtaaaaatctttctcatgattgtctatcaacctaatttcttgttttggggaggtttaaaagcctgtcaatttgctctacctccaatgaataagacacacatgacacatatagaacaaagaaaactggactgaattgggactttacacgtcatttttcattcgagtcgaaaaattaaatttatttccaataatgaaaaagctgcattcaactattgaatgcagctttgttttatatttatattatgcttcttgtttctcatcttcccatgtttcagcgtttttcagccctgggatgtttttcgctttaaacacaggatcaagtccttgcttacgctgtttcgcgtaatctttatacactttgtaagcaacgtttgacagcagcgcaatcacaattaagttgatcagcgccatgatacccataaagaggtccgccatatcccaaacgatttggaagcctgataaagatccatacacaaccatagcaataacagcgatacggtaaatgttcagccatgttttgcttgttttaataaattcaatgtttgtctcgccataataatagttgccgacaactgaactgaatgcaaacaagaacattgcgactgcgatgaaagtcggcgcccagcctccaatgtgatggttaagagcagcctgtgtgacttggatgccgtcgccttttggcgttacactgtacagcaaaataataaatgctgtggacgtacatatgataaatgtatcgaaaaatacgcctaatgtttgaataaagccttgctttgccggatgggatacatgagccgtcgcagccgcgtttggtgcgctccccattcctgcttcgtttgaaaaaagtccgcgttgcgcaccgataacgatgatgccgcctattccgccgccgacgacttgttcaaaacctaaagcatttttaacaattgtagcgataacgccagggaaagccgtaatattcgtgatgacaacaaataaagcgataagaatataaatgcctgccataaccggcacaattagctgtgaaacagcgacaacacgttttaaaccgccgaaaatgataaacgcagttaaaaccgccagaactatggctacaactattttatttacatggaatgcgccatccaatgctccagcaattgtatttgtttgaacagcgttaaaaatcaagccgaatgagacggtaattaagattgcaaaaacgatgccaagccatctggcaccaagacccttttgaatatagtaggccggccctccgcggaaatcctccccgtctcttaccttataaagctgtgctaatgtactttcgacaaagcttgaagccatgcctactgcagccactacccacatccaaaatacagcgcctggtccgcctgtcgcaattgctaaggctacaccagtcaaattccctgtgccgactcgggatgcggccgaaataaagaatgcctgcatagatgaaacacctttatttccttccggcttctcccctactattctgaacatttcaataaaataacggaattggataaaaccaaaacgtatggtaaaaaataatccaagccctattaaaatataaaataggtatttccagatgaaatcacttggaatattaatcaaactattgaaaaaagactccatatttacctcccgttttcatcaattcaatacgaattcgattttgatgttagattttttaacataacgagttttattatatcacaatatgacgaattaggaagttttttcgagaagaatattgtcatagccagatgttactctgtcgaccccttctctattattttcctacgaataaaaacattccttgcaaactggctttaaaaaaagagtaccctattaacaatgtaatcatttcttcccattctcttgcctttctctttgatttacacataaataaagtaataaatcctaaacaacatatcatttaaaatatgtttttattcacaccataaaccgggtatacatacgctaataaaagaagttttctctttcaaaaataagcaaaaagatatatacttaacaaagttaaatttatttttaaatttaataaatcaggtttacttttaggatggattggggtattattataaaaatattcagtaatattaaaggagggggagatcatttgaaaaaagtaacgatattgaaagcatccatcttattcttggcgattgccagttttcatttgttctcaattccccacgcctttgatatcggccatcattataaagccgtagccgaccagcaggaaatgcatgagatgaaagccggccaaaatgctgatgatgagaagaaatccatcacaggggcatttacgctgaccgctttatgggcaatggctgttctgctgctgaccgctgaaagcaaaagtacgggatactcccgcagacgtcagcggaaaaaaagctttatactggccaaattttatcaatcgtcttatttcggcaaacttcatgttcaacatcacccgattatgtaacgaaaatatgaggaggctgttaaacatgttgtttatcttaagaatggtgattttaggcttattttctttcacagcgctgaatttatttgtatggcaggggattgaagtcattcatgctgtaacagatctattcaccaaccatgaaagctgataaaaaacaaacgaaacccgctcatatagtatgagcgggttttttattattgttctgtatgaaggcgccaaacagctgtaaccttgcctgattcctcttcatcaaaaaagaaagagccattgctgtatctgtcgtttgtccgcaactcttttgtctgcagttcttttctgtcgcctttttctgtttctgccattagtcgctgttcaagaccgcaagcgaacagtgctacaacacggtgaggattctttttcagttcccttagcattacgacaccgcgttttgcacgggatgtcttctcgaactcagaaagactcatgcgtttaaccgctccccgctgtgtgaacaagacaattgaatcagattgctgaagaatctcaccggagacaacaaagtcatcctcttttaagttaatccctttgacacctgccgcacgcgcgccaactacattcacttcgtcttctccaaaccatagaccataccctaagtgagtggccataaagatctggctttccccatttgttacatgtacatcaatcagttcatcttcacccttcagatttaaggctacaagtgccttagaataacgctgtgctttataatgagtgagctctgtctttttcaccataccgtttttcgtaaagaatagaagatatgccgacggatcaaattcttttatcggtatagcctttacaatcgtttcatcacggtcaatagtgattagatttgaaaaatgctggcccatgtccttccatctgatatcaggcagctggtgaacaggacaatagatgtagcttcctttgttcgtaaagagcagcagcacgtctgtcgtattcatttcaaactgatgcagcatcctgtccgtatctttcattccgaagtcctgaccgttggaagcggcaaatgagcgctggctcgtccgttttaggtaaccatccttcgtaacggttacatatacatcctcagatgcaaccatgacttcgagattgattttaatttcttcaattttttcttcaatcacggagcgtctcgtatctgcatatttctttttcagtgcttttaagctgtttgtaatcacttttagcagttttttatcattgctcagaatagattcgagctcttcaatttttttaccgagctcttctgcctcttccttaagcgctgtgatatcggtattggttaaacgatatagctgcaatgacacgatggcttcagcctgaggctctgtaaattcatatttcgcgatcaaattgtttttagcgtcacgtttatcgctagaagaacggattgttgcaatcacttcatccaaaatagacaaagctttcatgagcccttctacgatatgatgtctgtcttttgctttttgaagctcgtaaacggaccggtttgtgacaacttccttttggtgtccgatatatgcatccaaaatagacggcaggctcatcagcatcggacggcggttatggatagccaccatattgaagttatatgtgatctgcaaatcagtatttttatataagaaattcaaaatgcctttggcatcagcttcttttttcagttcaatgaccactctcagccctgttcgatccgtttcatcacgaacctctgagatgccttcaacctttttatcaatacggaactcgtccattttttttacaaggtttgctttatttacttcaaatggaatttcagtaatgacaatttgttctcgtccgcctctgattgtttcaatttcagcctttccgcggataatgatttttccttttccggtttcgtaagcttttcttatcccgtcaacgccctgaataataccgcctgtcggaaaatcaggccctttaataacttccatgagttcgtcaacagagcaagaaggcatttgaatacgcttaatgacagcatcaatgacttctcccagatgatgagggggaatgtcggtcgcgtatcctgctgaaatcccggtagatccgttgaccaataggttaggaaacatcgccgggagtacgacaggctccttgcttgtatcatcgaagttcggcacaaattcaaccgtgtttttgtcaatatcccgaagaagctcagatgctatcggagataatcgtgcctctgtataacgcatggctgccgggggatctccgtcgatgcttccattgtttccatgcatttcgattaacacattacgaactttccaatcctggctcatccgcaccattgcttcataaaccgagctgtcaccgtgcggatgatagttaccgatgacgttaccgaccgttttggccgcttttctgaagtttttatcaaacgtgtttccatctgtatgcattgcatacagaattctgcgctgtaccggctttaatccgtctctcgcatcgggcagcgccctgtcttgaataatatatttactgtagcgtccaaaacggtcgccgatcacctcttctaatggtaaatcatgaaataattctggctgtgacaatcattaaacctcctcagcgaccgataagttttcattttctaaaatattgctttcttcatctaagccgaaagcgacgtttttctcaatccactttctgcgcggctctactttgtctcccattaacgtcgtcacacgtctctctacacgtgccgcatcgtcaattttgaccctaacaagtgtgcgggactccggattcatcgtcgtttcccacagctggtctgcgttcatctctccaagacccttatatcgttgaatggtatagcctttgccgacttttttcaggacatcccccatctcttcatcagaccatgcatattcaatgatttcctttttcccgcttcctttactgaccttatataaaggtggcagcgcaatgaacaccttgccatgctcaatgagcggtttcatatagcgatagaaaaaggtaagaagcagcacttgaatatgggcgccgtcagtatcggcatcggtcataatgatgattttgtcgtagttgatgtcatcgattgagaaatctgccccgactcccccgccgatcgcatgaatgatcgtattgatctcttcatttttaaagatatcagcaagcttagctttttctgtattaatgactttaccgcgtaaaggcagaaccgcctggaatctgcggtctcgtccctgcttggctgacccgcctgctgaatctccctcaacgagatacaattcattttttgccgggtttcttgaacccgcaggcgtcagctttccgcttaaagtcgcttctgatttttttcgttttttgccgcttcttgcttcttcacgggctttgcgtgccgcttcgcgcgcctggctcgccttgattgcttttttgacaagaagcgttgcggtgtcccgattttcctctaaaaagtaagcaagctgctctgaaacaatcgcatccaccgctgatcttgcttcactggtaccgagctttccttttgtttgtccctcaaattgaagaagctcctcaggaatgcggacagaaataatggctgaaagcccttcccttatatcggtgccttcaaggttcttatccttttctttcagcaaagccacttttcgcgcatattcattaaaagcacgcgtcatcgcagtttttgcacctgactcatgcgtcccgccgtcttttgttctgacattgttgacaaacgacaaaatattttcagaataaccatcgttaaactggaacgcaaagtccacttctatagaatgatgctcaccctcaaacgagaccacttcagacaagacgtctttttcttcatttaagtaagcaacaaacgcttctatgccgttttcataataaaagacctcacgctggtcattgcgttcatcaatcagctcaattttcagtccttttaacaaaaacgcagactctcttaagcgctcagagagcgtttcaaaattataagtggttgtgctgaacatcgttggatctggcttaaagtgtgtaagagttcccgtcttttttgttttgccgatcttttcgagagatgtaaccggttttcctccattttcaaatcgctgctgatagacaaaaccgtcccgctcaatggtaaccgtcagccattcagataaagcattcacgactgatgcaccaactccgtggagcccgccgcttgtcttatagccgccttggccgaatttccctccggcatgaagcaccgttaaaatcacttcaggggttggtttgccgagcttatgcattccggtcggcatgccgcggcctctatcctgtacagaaatactattgtctttatgtattttgacgattatgtgatctccatggccggcaagcacctcgtcgacagagttatctacaatttcataaaccaagtggtgcaaaccccgcgcgtcagtagagccaatatacatacccggccttttcctgacagcctcaaggccttcgagcacctgtatggcatcttcgttgtaatcaaattgctgttttctagccaaacgtacaaacccctttcaaaaactaacattgtctttctcttttcagtgttacacatcatttgtatataagatattttttataaacctcgcctcgagccagtactgccttggactcctcattataaccaatatgtttgcaatcgcaacatagagctaacgaatcagttcttctcaaaacatcggctagtgctgtttttacactatgagaacgtatgtttgtttattatatataaagcagcagaccttcgcaaatcgaacggccgaaacccagctggacaaggtattcaaaaaaagctgttcaagctttattgtatctgtttcaccgtaatacgcaaacaatatcttaaaattaaaaagcaaaaatccttgaatttacaaggatttttgcagttctgcacctattttgttacagcgtgtgccacttttatgcacagatccatgataaccgttctgcctttttcttttagcatctggtatgcttcctcattaactagcccttgctgtgcccaaaatactggcgcatctgtctctaaaaactcttccgccactccaggaagctgttctgagcgccggaatacatttacgatgtcaatcggaccgtctatctcttttaaagatgaaacggctttgacacctagcgcctcatcaattgtagggttcacagggataatttcataacccgcgtcctgcattgcttttgaaaccatatgtgacgttctatccggacggtctgaaagccctactaccgctatacgtttgcttctttgaagaatctctttaatttccgctttagaagggttttgcatcgtgtgtcactcctttttcacttattttacacgatcaaaacaggagaaatcaaaatatgatgcatgtttgatttgatttgtaagcaaactttacaaaaaaacttatcatcagatcatgacatctcatgttaaaataaaaagaagggaatttgaaaaaggagaaatgtagatgttaattgctttattgattattttggcctacttgataggcagcattccatctggcttaattgtgggcaagcttgccaaaggaattgatattcgggagcacggaagcggcaacttaggcgctaccaatgcattccgtacattgggtgtaaaagctggttcggtcgtcatagccggagatattttgaaagggacactggcaactgcattgccttttctcatgcatgttgatattcacccgcttcttgcaggagtctttgcggttttaggccacgtgtttcccatcttcgccaaatttaaaggcggtaaagccgtggcgacatcaggaggcgttttgctattttacgcacccctgttatttatcacgatggttgcggtattcttcatctttttatacttgactaaatttgtttctctctcatcgatgttaacagggatctatactgttatatatagtttctttgtccatgatacgtatttattgattgtcgttaccctgctcactatttttgtgatatacagacaccgagcgaacattaaacgaattatcaataaaacagaacctaaagtaaaatggttataagcttaaaaaacttctcttttgacacagaatagcctaatacgtttataatagagaaaattcaaatgaagaacaaaggggtgttctgttatgaatatgacaattaacgaagacgcattgaactggtataaagaagaactcgatttggaaagcggagaccaggttcgctttttcgtccgctatggaggctgcagcaacgttcaaaagggtttttctctcggtgtagcgaaagatgccccacaagaggctggagtcactgcagaagctgatggcattaccttctttattgaagaaagtgatttatggtactttgataaccacgaccttctcgtcagctattcagaagacgctgatgaaccggtttttgaataccaataaaaaagaacgcacttcatgtgcgttctttttttacaaatgaaatcgtataagatgatcggttaggttttcttgttccaaaatatatttttgtgtttcccccagcagatcaaagtggggaaattcacttttcttatggatccattctttttttaacccgtacgccgctccccactgaaccagcttatcaatgtctgcacagccggcttttgtcacggtctttgcttctggaaatcggtcatccagccagtaatgtgttaaaaatgcgatttctcctcttttcactgcttgtttccaccggttaagttcctcccgtttcacaccaaacgccatatcccgttcacttccctattttttggccttttcatatgctgtgtgccaatcaggaaaagctttgcggaattgaattggcttaaagctttctttatccacacaaatatgagatgaggtggctttgatggaaagctcaccggccggattataaatgtggtaaccatagacggttttaaatccgttatagtcctctatccatgtatgtacaaccgcggtttctccgtaatgaagcggctttttataggaaatattgatatcaacgactggggacagaacgccttttttttccatatcactatataaaaagcctaagtccttaatcaaggccgttctgccgacctccatccacacaagataatttgcgtgatagacaatccccatttgatctgtttctgcataacgcacttctatttctttttttgatacatgcaagattactctgctcccttaacgtcaatttagccccattttaccataatcaaatcagaaagaaaaaaaccaggtttccctggttttttaagaacggtatccgttttgtctcgctgcagattcgtcctgtatttcattacgaaacgcttcaatgctctgttcgcgccttgcatttttttctttgatacgctgtttatcttctcctgaagcaaactccattgatgcttctgcttcttctatattttcaattgtattttgaaccatatcctgcaatttttccacattgtcagaacgatcatcaggattaggctgctgatattgattttggttctttgtcattcggatgtacctcctagaaataaactcgaattttcgctactcgccttttgtctgcatgataatcggccgctgtcctgaagtatcatgcattttttcccctttattggctttatattttacaggctttgtacccaagtggcttggagcatattgaggctgaccgtttttcttgttgtttcccatgtttatccctcctcaacagataggtttctcaaaaggaggggtaaacatgaatacaaattaaaggttatttttgcttaaatcgctgttcaagcttttcctcaagctgatttaaatactctgtattggtcatcagctcttttttgttttccatgacgagctcatgaaaagaacgttttctcatcttcttcacgcttctcacctccgcatattcttttattttttccaattctgaaaacttgtaagcatatttgagtataaaaaaaactgaatctaatcaagatccagtttttgttccatttctttttttgtcatggtgccaacatgtatgtcttggataacacctttttcatctaagatatatgtcgttggatatgacatcacgttatagtcagcattgatcccttttttatcaatcagaatggggaacgttaagtcataagtatcagcaaacgctcggacctgtttctcacttttctcagctgaagtgaaatttaccgcaacaaccgcaagtttgtcggcgtactctttttgcagcttttccatcgcaggcatttcctgacggcacggcttacaccaagttgcccaaaaattgagcagcacttttttgccttttgcatcctgtaaagagcttttctctcctgatagcgttttcaaagaaaaatcaggtgcttgttgcccctcttgaattccgacttcttttttgctgtatgtttgatataaattccatcccgtataaccgactagcatgataagcaggatccctgcgagccattttttcagcatatgccacctccgcagcacattgtgtcataaaaagaagagaaagcgaaatgccttctcttcctattgattcatcaggactgcttcattttttcacgaagcaccatttgaaggatgccgccatggcggtagtaatcaatttcaacttcactatcaaagcggacgactgcttcaaaagttgttacattgccgtcttcattgattgctcttacagtcacaaggtcacgaggacgaactgtttcatcaacatctacctcgatgacttctttacccgttaagccgagtgtatccgcattttcaccttgtttaaactgaagcggcagcacacccatgaatacaagattgcttctgtgaattctttcgaagctctctgcaatgaccgttctgatgccgagaaggtttgttccttttgcagcccagtcacgtgaagatcccataccatagtcttttcctgctaatacgacaagaccggttttatcttctttgtatttcatgcatgcatcatagatggatgttacttcaccagtcggccagtacgtcgtaaatccgccttctgtacccggtgcgatttggtttttgatgcgaatgttggcaaatgttcctctcatcatgacttcatggtttccacggcgggagccgtaggagttaaagtcacgaggtgaaacacctttttcttgcaaatactttccggcaggcgtatcttttccgattgcccccgcaggagaaatatggtcagttgtgactgaatcgccgaatttaccgacaacacgcagtccttttaatggctcaaccttgcctggctcaacagacatctcttcaaagaatggtgggttttggatgtaagttgaatcgttatcccatttatataaagcttcatctgttgtttcaatttcgttccagcgcttgttgtcatcaaatactgtttcatactctttgcggaatagctctggcgtaacagtttgcttaacaagtgcattgatttcgtccattgacggccaaatatcattaaagtatacgttttgaccatccttgcccacaccgattggatcggtttttaagttaatgtttaccgttccagccagcgcatatgccacaacaagcggcggtgaagcaagatagttgcctttaacaagcgggtgaatacgtccttcaaagttacggtttccggaaaggacagacgtaatcagaagatcatttttcgcaaccgcttcttcgatttccggtgaaagcggacctgagttcccgatacatgttgtacagccgtacccaacgaggttaaagccaagctctttcatgtatggaagaaggcctgaattcacaagatatcctgtaacaactttagaacccggtgcaagtgacgttttcacgtaattaggcaccttaagccctaactcaaccgcttttttcgctaccagtccggcgccgatcagcacgtatgggtttgatgtatttgtacagcttgtaatcgcagcaatggcgatcgcacccgttttcataactgtttcttcgccgttaaggagtttaaacttaatttctttattttcttcctcagcatttaaaccgaatccttggttacctgcagggctgactaattgctttttaaacgtttcctgcatagcagatagcgggatcaaatcctgaggacgctttggacccgataagtttgcttcaatttgagacaggtcaatttcaaccacatcagtaaattgagggtcttccgcatctggagtgtagaacaagccattgcttctgcagtatgcttcaacaacatcaatatgttcaggatcacggccagtcaggcgcaggtagttaagcgcttcttcatctactgggaagaatccgcatgtagcaccgtattccggagccatattcgcaattgttgcgcgatctgcaagcggcagttcagcaattcccggtccgaagaattcaacaaatttaccgacaacgcctttttcacgcagcacttgtgttacttttaacgccaagtcagtagctgttgttccgtttggaagcttgccgacaagtttcgcgccgattacctctggaactgggaagtaagaaggctgtccaagcattcccgcttcagcttcaattccaccgacaccccagccgagaacaccgataccgttaatcattgttgtgtgtgagtctgttccgacaagcgtatcaggatacgttacaagctcgccgtcttcttcaatggcatggacaacacttgccaagaactcaaggttgacctggtgcacaatacctgttgcaggcggtactgcctgataattgttaaacgctttctttgcccagcttaaaaatttgtagcgctctgcatttctttcgaattccaagtccatatttactgctaatgcatcttctgtacccgctttatctacctgtacagagtgatcgataacgagatcaacaggaatttcagggttgattttatcaggatctccgccgacagctgccattgctttacgcagtgaagccagatctactactgccggaacccctgtgaagtcttgtaaaataacacgagacggtttgaacggaacgtcgatatcctttaattcggcagttccccattttgccaaattttccacgtgttcttttttgataacgaagccgtcaacttgacgcaatactgattctaaaagaactttgatggaataaggaagcttcgaaacctttcctatacctgaatcttctaacgcttttaaagagtagtaatgatatgttttcccatttgtagtaaacgtttttctcgcttggaaaacgtcttttgctgcagttttttgctcgtttgccattctccaaaatcccccttcagatcagatcattctcagatgaacattacattccatcacaattttctcacaatttcatattaaaacaaaatcatacataagtaaatatcaatgtttttattaaatacaataagttcgacttatgagaaaaatgtaccggtaatttttactgtttacgctctctcatataacacaataaaagaagccatattatgattgaggtgataatgatggtcaaaagaaaagcgaatcacgtcattaacggaatgaatgacgcaaaaagccaaggcaaaggcgccggctatattgaaaacgaccagcttgtactgactgaagcagaacgccaaaataacaaaaaaagaaaaaccaatcaataacaccgaactcttttaaggaggttctcattttatgaccaataagaatacaagtaaagatatgcataaaaacgcccctaaaggacacaatcccggccaacccgagcctctaagcggaagcaaaaaagtaaaaaaccgaaaccatacaagacaaaagcacaactcaagccatgatatgtaagaaaagcagaccttagtgtctgtttttttatgcgttcacccatttataatccaccgcatatgatgtaaagcaaggttgatatgtggaggaatgcttccatgaaccattcaaaacgcaacgatgcgaatgatttcgatagtatggatgaatggcttcggcaattttttgaagaccccttcgcctggtacgacgaaacattgcctattgatttatatgaaacaagtcagcagtatattatagaagcggatctgacttttttacagcctacacaagtaacagttaccctttctggatgcgagttcatcttaactgtcaaatcgtcaggacagacttttgaaaaacaaatgatgcttcctttttattttaatgacaaaaacattcaagtcgaatgcgaaaatcaaatactcacagtcgccgtcaataaagaaacagaagatggctcttctttttctcttcaatttcctctcagctaaacataaaaagtcactttcatcccctattatgaaagtgactttttttccgtccatttatcgtcaaataccctctagtgactctcccatggccaaatagcagattcactatacaatagaatatgatctactatctcttttgactagacgtctatcacttttttctattctttttttactgtgttcttctaatctctcttcgtatacaatatggttagaataagggggaatgattgatgctggaaggatggtttttatggtttattctgttttgggtaatcatgatggtagtcttattatcaatcggcggttttttcatgtttcgaaagtttttaaagcgtttaccaaaagaggacggcagatcagagcttgattggcaggattactatattgaaaacagcagacatttatggaacgatgaaaacaaacagtttctagatgaattgactgcgcccgtgccagagctgttcagagatgcagcaaaagctaaaatcgcaggcaaaatcggtgagcttgcattaaaagaaaaggtagcaaagattgatcagcaacttatgatcaaaggctatattctcgcaactcctaaaagagaccataccttcttaaaaaggcatctgcgggacaaaaaaatcgatttggaaccttatcagacccttctcaaataaaaaacctttcctgacaagaggaaaggttttttaattcatttgaatattagatgactgcagctcgttatgaagttttcgatatgataaatacatggcgattctccaaggcacaatcataccgaaagccagaatccaaaacattccgctcagtgcaccataatcaattgatgtgctcaagatcgatttcatcacgattctgatcaccaaaagaccgactaatataaaaacaaatgctttagagcgtttcatgtaaatttcattatttttaatttcgaacttagaagttttgattagaaaaatagagaaaatcacacctaaagtgaatgcttccaaaaactctgctccagttacccaaaataccggaaataaaaacattaacgctcccgtactcataaaaatcggcggaagaatgattttttttggtgaaacaggcttgtcagaggactttattctgaccaccatcacagctacagccattaacacagcaataattgatgaaactataatcatcatacttatcattcctttgtttctcggagtgttgatactatatactatactccaaaacaataaaaaaaaccattttgaaaagaaatgactttaatgtcccataacgcggcttacagcttccagcacttttgtttcctcaaacggcttaacaataaaatcctttgcccccagctcaattgcttccgttacaattctttgctggcgcatggcggtgcacatgatgaccttcgctttaggatcaaaggttaagatatcacgaagcgcttttatgccgtttttcaccggcattgtaatatccattgtcacaaggtccgggcgcagttttttatacaggtcagctgcttgttcaccgtccgccgcttcgcctgcgattatgtaatttgcctcttccaagatctctctgattttcactctcatgaacttggcgtcgtctacaactaaaactcttgtcatattcccctccaacaatcgatttccacagataatagtcttattgtaccaaaaacaaaaggattagtagtagtacgaaagtaatttaccgtcaaaaaccagtaaagcctccaaaaagatctgacagcaaaataatgatcaggctcatccaattaaagaataacagcacaccaatcacaatcatcaaaacgccaccagctttcataatgaaaagctggttcttccttatccacttcagctttgtgataaaaaaagacaataaaagaaacggtaccgcaaaaccgagtacatataacatcatgtatggcaccgctgagcccggattggtgcctgcaagtgtgataacagcagctaatatcggaccggtacatggtgtccatccagctgcaaatgccattccgattaagaccgaccctaaaaacccgcttggtttatgcttaaaatggattctccgctctttcatcatagcctcaggccggaacacaccgagtgtaatgaaaccgaacaaaataataagcaacgcgccaatttgccgaatcgcatcgtgataatccctaaacaggctgccaataaaagatgttccatagcctaaagcaataaaaatgactgaaaagccaagcaaaaaacacaaagtatgaaacaagcttcttttctgcagcagcagcttttcagtttttacatcgtccatgctgacccctgtaatatatgacaaaaaagctgggtaaagcggcaggcagcaaggcgaaataaaggataaaaaccccgctccgaatgtcaaaaaataattcacgtctcccatgtcatcatcccttcatgatttgacattccttcaagttatgacaaaatcatttcatttttttaacactttcacttgaaggatttctattttcagaaaaaacttatataatttaatttgacattgagacattatactccttctcatttgaaaattagtataaatatggatataatataaacattcactttgaagatctaatgtatgaaaggatacatccctgtgattagagagcatctattaaaagaaattgaaaaaaaaagagcagagctgctgcaaattgtcatggcgaacggaatgacatctcatattacgatagagctcagtcaggagcttgaccatcttctcatacaatatcaaaagcagcgccttcgagcagtagcgggtgatgaatgattgcaaaataaaaaacccgtataagggttttttattttataaccatgtttctctatatcataatctttacgtattatttcgtttgattattcatggctttcatcatttgattgattttcttttgagaaggtttcattcccatttgcatcatcatcatgcgtaacatttgttcattaataggcggattctttttcaggtagctcatcatatatttacgagcaataaaaaacccgagtgcaacacctatgagcaatgcaacaacgcccactaggatgccaacccataaagtcattttatttcctccttcatgttgtctagtttaaagtgtactaaaccaaaagctattatacaacatttacatctctttttcttcggttttagacaaaatttctttctttcaccggatttagccatccgtaacgcttcgaattgaaatccattgctaaaaagcaagggcttacttttcttaacacttcaaagaatatcgtttctgcctcgtaatctcccgaagccacaatttctatcatgtgctccttcatcataaacgtcgcgtggccttttgctttcggcaaagctattctataaatataatccagctgcctgtaatccgtcttgtttaaattcatttttaaccgctgatgcatatgtaaaatcgggattggttgtgtaatatattgaatctgtttctctgtcatttcatactgctgcttttcaaggcttgtccaatgatagtcttgaaacagctcaaacataaccgattcccggccgaaatagtgattggcaaattcctctttgatcaggtacgtatagtagtgacgttccatcttttcatccccttttccagcagcatttcatttgctctctattatacaaaagaagaaaagaaagaattgtctattactgttaaacagccaatactatttttgtcggataaacaagaaaaagaggatgatttgactcatcctctttcaaaagcttacttattgattaatgccttaactcgattcactacgttcggaactgagaagccgtattcgttaatgatggtttcaccaggagcagatgcaccgaatcggtctatgccgagaacgtcaccttcaagccccgtgtatttgccccatccaaatgatgagcccatttcaattgcaagacgttttttcacatctgcaggaaggacttcgtttttgtattcatcagattgtttctcaaaacggtccattgaaggcatgctgacaacagaaacatcgatattttcttttgccaattcagcctgcgcttcaattgcaagacctacctctgatccggaagcgatgagaagagcgtcaggtgtttcgtttttagatttagaaacgacatatgcacctttttctactcctgccaatgcttcttcagatgtttgatcgatggtaggaaggttttgacgtgtaagcactagcgctgttgggtggtcagtgctttgcactgcaagcttccatgctgctgctgtctcattgccgtctgctggacggatcaaagaaaggttaggcatcgcacggagtgaagcaagctgttcaacaggctcgtgcgtcggaccgtcttcaccaaccgcaatactgtcatgtgtgaagacatatgtcacaggaaggcccattaacgctgcaaggcgaatcgcaggacgcaggtaatcagagaagacaaagaaagttccgccgaatacacgaagaccgccatgaagcgccataccgtttaaggccgcacccatcgcaaattcacgtacaccaaaccagaagtttttgcctgagtaatcaaccgctgtaaaatcaccggcatttttaatagtcgttttgttcgatcccgctaggtcagcagaacctccgacaaagaaaggaatttttttcgcaagtccgttgagaacttcaccggaagatgcacgggatgccaaactgcttcctttttcatacacaggaacctcttgatcccagtccttcggaagctctcctttgattgccagttcaagctgttcagcaagttcaggataaacttctttatatttagcgaattgagcattccattcttgttcttttttctcacctgattctttaacagctacagcgaaatgctcataaacttctgacggaacgtagaagtcttcttcatatgtccacgcgtaagcttcttttgttaatttgctttcttctttaccaagcggcgcaccgtgaacaccggatgtaccggcacggttaggtgaaccgaatccgattgtcgttttcacttcaattaatgtaggtttcttttcattttggcgtgctttttcgatagccgctgttaattcttcaatattgtttccatcctcaacataaagaacttcccaattcattgcttcaaaacgctgtttcacgttttcagagaatgaacggtcgaggtctccatcaagagagatgtcattagaatcgtatagtacgatcagacggccaagctgaagatggcctgcgagtgaagcggcttcagaagaaataccttccattaaatcaccatcaccgcaaatactgtatgtataatgatcgactacgttaaatgaatcgcggttgtatgtttccgctaaatggcgttcagcaattgccataccgactgccatggcaattccttggccaagcggacctgttgtagcatcaacaccggcagtatgtccgaattccggatgtcctggtgttttgctgccccactggcggaatcccttaagatcttcaatactaagatcaaacccgcttaaatgaagcatgctgtataatagtgctgacccgtgtccagcagataaaacaaaacggtcacggttaaaccagccagggtttgccggacttacgttcataaattttgtccacagcgtgtatgccattggagcggctcccatcggcatccctgggtgaccagaatttgctttttcaatagcgtctattgacagtgtgcgaatggtagcaactgatttcttttcaattgtatccataaaaatccccttccttatgtgttgtacccttacatcataaatgtctgacgactttttctcaactgtttcagcttaaatttgagagaaacttgttgaattttgtcacataagagttttgattatagtatatgcaaaagaggaatacgatattgccgtattcctcttatattagtgaagtttgttatttctttgttctctttttagcttttctggtgtaacatcattgccttctgggtcaatgattttcacactttttaacgtgttcttcatagaagaacgaaaacctttcaagtactcttgacggagcttttgctgttcggctttttcttcttctgtaataacgccagctttagctttggcagcaagttcattaattctggcaattttcgcgtttgaaatcatgttaaactcctttattgcattttgtctatatagtactagatcaaaaaaagttttacaactgattcactctgcagtctcttcattctctatgtattcctgaaaacgccggtgaacggttgctttagagacatcatagccaaaccctcttagggtagccgcgatttcagcaaacgtcagtttattcgctctcaggcggacgatctctgagattggcacctctattttttcttttccactgttcccatgttggttttttaagtttttttgcggtttaaaaccgttttttactgcacgtttcattccccgtctgattttcatgttgtgaatctttcgctgatactcttccacaatgctgacgatttccaagaccattgagtcagcctccgataactccagttcacctctatgagccgttgtatagactttcacaccttctctataaatacaatgaagcagtgcgatttttgcgtttccccgtccgagccttgtctcatcctgaaccaaaatgacatcaatatcagcgttcttaatctcatcgagcagctcaaatacaccatcccgatccatttcatatccgctggctttttctgaaatcactttgaccacttccatgccgttctccgctgcaatggccgtaagctcctcctcctgccgctttaatgacgtttcctgctgttctttatttgtgcttacacgggcataaatgagtgctttcattttatctctctttcctctctatcttacagttgctaattcatatgcatcctgatgcttctttttcaatgggatcactaactcatcacccggctggatatcagaggtttgaagttgatttttatcagctacccattcaataaaatcatttttgtttatcttttttgtatcggctacctgatcagcaattgaccagagtgtgtcgccttgctggacttctattttaacatactgattaagctcttggccgctgcttgtatatgacagcataaggataaccgcgctcaaaatcactgtaaacagaccgacaaaaataatagattctttactcatgatcataacctccaacaggaatgtttgttcgcatttttataatttcagtatatacgaacaaacgtttctgtcaattgttttttcgaacctatgtttgtactgtaaggaaaatcatgctataatcttcttaaaatcgacgttttgaggtgcgaaaaatgacgaagctatcaaaaaggcaacttgatatcctccgttttattaaagcagaggttaaatcaaaaggatatccgccttccgtgagagagatcggagaggctgtcgggcttgcgtccagttctactgtccacggccatttggcccgtttggaaacaaaagggctgatcagacgagatccgacaaaaccaagagcaatagaaattcttgatgaagaagtagacattccgcaaagccaggtcgttaatgtaccggtcatcgggaaagtcacggcgggatctcctattacagcagtagaaaatattgaagaatattttccgctccctgaccgcatggttcctccagacgagcatgtatttatgctggagattatgggagacagtatgatagatgctggtattctcgataaggactatgtcatcgttaaacagcaaaacacagcgaacaatggggaaattgtagttgcgatgacagaagatgatgaagcaactgtaaaacgattctataaagaggatacccacattcgcttgcagcctgagaacccaacgatggaacctatcattttgcagaatgtcagcattctagggaaagtgattggcgtgttcagaaccgtccattaatctattgatctatcagatgcataaaataaccccctcttcctttacggagagggggtttgttgttcaaaaaaagcaggctcgccctgacttttgggtgcgagcccgaataggaggaaaaagaacatcatgtttacaccataattatccaccaaaagattgttgaagtcaagaaattttctttcctttaggaaacttttatcaaaatatgaacatttagaatattagacgccatcttcttaaaaacgtttcattttttaggtcgtggaaggatgcggttttatatttattaaggggcaaagcaattgaaatatactgaaaatttagtacatagtttaattagttcaacatttgataaaacagctcgctttcttcatataaaatgtaatgtaatgtgtatttcaatttcaccttcacccaatcacttgtgcagttcaaaagatatggcatcgttgaacaagtcgggtagaaaccttccccaaacataaagtctccaccaacacccttctttaaatttaaccttatatgaaatatggttgtgctatcaaaaggccgtttcatcataaaagtgcatatgcgttttttcttgtttgtaatatcgaagcctgtcttgaagggttccggtatgaaattcaaatttgtggccgtcagggtcggtaaaataaattgattttcgatcgcgttcatctcgttctctgccaggcagaatattgacatgaagtctttttaatttagctgacatctcctcaaattcatgatcttcaattgtaaaagcaatatgggtataagaaagcttaatgtcatttctcgggatgtctggttcttcattaagcgctagccagatgccgttcatatcaaaatatgcagttgttcttccctttaccaaaagctttgcaccaaacactttttgataaaaatcaatcgatgtatccaaatgcgaaactgaaaatagcaagtgattgattccttttatctccacaaatcattccccccttgaaagctgatcatccacatatacgacttttttcataagaaagtttcatacagctgaaaaaaataccagtgtaaacaaaaacggactgtttaaaatagtaacatgaccattatgaatggttttgaattgcattatttatcatttgtttacgcccaagaattttcttcaaaaaataacaatttaggtggtcaaatgaaacatatcattgcgcttgcttcaaagattgctttcactctcgcccttttatatgtgattttggacagagtctatcacgcatcctttttaagtgtgatgtttattgcacttttcttaggttttgtttcctatctttctggtgacatgctcgtcttacccagaacaaacaatattacagcttcattggctgactttggcctttcattcgttattctttgggtatttgttttaacccaaacaagaaacgatttctcaccatttggagcggctctcctttccgctgcctgtcttactgtttttgaatacttttttcatcggtatttactgaaaaatgtgcttgatgaaaatttccgaaatgaactgtcagcgagagataacacgttgcagtatcaaacggaagccgcggacgagctgtttcccgaaacgaaagagaagcataaggaataggaggctgtcttatcgcctcctatttttcagtagctatttttgagaaaacggaacatcacttctgtaaactcataaaacctctcattttgagtaacagctctgctttttaaagaaaagatgccgaacaaagactttcgaaaccctgtgctcatttctatctgaatacttaaacctgtttttgatttatttgcaatgttattcggactaacgcccgcatgcggatggtccatattgagcaatacagcaggaaaaccggcatgctgcaatttctcaactaaatctgccgctcttacgcgatctgtaccgccgacttcgatctgctgatcttcttctgcgtacccgtgtaatgaaatgacatattcatgatttcccgtcattttaagggcccgaggttcatcaaagtgtgtgctcgtaatgtgcaggactgagtttcctgccgattttaagccttcaaataaatacatcgagtactctttgctgagctctctcgctacttcacttgtcccgccttcaatacctcctccgtgaatagctaaaacaagaacagggcttccggtttctttcgtaacaacgccataatcagaaggatcttcattgttttttaattcctcaaaattctgatatacatcttcagcataaattgaagaaatcggagtaaacaccataaaaatcatcaataattttacaattttaatagttgatggaaaacgtttggctatgttacaatcaacatgcttcaaggaatggagcaaacggcggagcagggatactttggccggtttcatctactccgcctctaagtccaaatcaacagaatgtaggtctctttgaggctttagcacgaattctctcgtcctccttgttaaatttttgttaaattcacaatattatataccattagcccgggcgctgttcttctcatttttgaatttatgaaaagtaagctggcaccacctcccccattttccatacaaaacaaaaatgcacctgccctttggcctgtgcactttttattttctcttcattcttcgtttttttgcttgatttaatttcatgatgtttttttcaatttttcttatgtttcgcctttgcgggattgttttcatttcataataaacagaaataaacccgcttactgtcactgctgcaatataaaggacgcgctgtttgatcatccggtcagcatgtccatgatcattcgcttctttttccagtctttcgatcacagctttatcaaacagctgatcgacatacacttgtttcattcccactgcaaacccagcagccagccaaagaatcagaaataaactgatataaaacaccataaacccttcctttcctgtcttgatgcggtgcagaattttaaaacagttcatctcattacaactggcagacgaagcttcttctttgtgttaggttctttcaataggctggttaatatgtgtaatgctgtaatgaacagttagaaattttattccaaacagccacatatgatgaacagcggttaatttgttgtcatgtacagcttctatcagaaaggtttcagataaaggaagcggacaagttcccgctcttgtttgcagataaatcccctcatcccccgctctgctttttctccgcctgcttgttaaaaccagcttctcctgatgatgatatggttttaaaatacctgtcatgctgctgaatggaagcggtaaagaaatattcatatacccctctccatttgaacgatacactgaataaagagcggtaaaaatggtttcgtttttttcatttgttctaatccaggcacgtactctttcccttccgtcttttttcgaatgaacaccttttatcttgctgtacatcctataccagtcagggttcgtcgaaagatgtatttggccgattcttctgctgaaccattcgtaaataattgcaagcggccgaaaccacgtgctccatgttacttttgctttaatattgtattcgatggtttgttcataaaacgaaagaatgagcggcgccagtttttctggtgaaaaatcttttgaacgcaggctgcccatatcatccacaagtccgctgtaccgagcgttattttcagcttgaatgttagctaaaaattcttctccaatctttctttttccgtagatacggctgaatgtctttacactgtctgcatcaaaaggtttcgcatcctctattctccaccctatgagagcgggcaagataacaccaaacgcgttgacaaaaccgtgaatccaaatcatctgattgatggtcaatgtaacttcttgccgaaagacaccaaatgaataaatcatcgagaaagcaatcgttatcattaaaacagcggaagaaagccgaataagaaatgtccccgtcttggtgcgaaaagctgccgtgaacaccaaaaatgcatgaagataaatcgccgccatataaatgctaaccgcaatgacatcaagtgtttttgaatatgtgatgcccagtgcgataagaaggggcgaaagcaaaatcacccatgttatccaactgtacaacatccgatgttttctaatggttctgccgagtaaaccgttgaagatcgggatcagaaaagcagaatagtgaaagtggacagcagtcagcaaaatgatgagagggccaaattgcatgatctgcaaatgggcagcataagcaaaaaaccaaaatcctcctcccgccaaataaataagaccgaacaaaactgatgtctcttcgattctatgtatctttgtttcccaaaggcggaggatcgcatacaatgcattaaaaactgtgtacatccaccagataagtgcgaaacccccaacctccgtcactagagccagcaccgcaaagaatgcggctacaggatagcactggattagcccgttttccataaactgagcagcacgaaccggagattgacgaaaaacaaaaggaaaaattcccggcacgaaaaatagaatggataacaaaacgagtgcctctgccactgaaatatccggtgcttctgctgcaagaaatccaataaaacaaagcgcactgactatgccatttcgtttcatgattctctctcttcctcctgaaacgttcccttataaaagaaaagagtgccaagaattgtattttgcacatgcacttcaatggtgaaacaattctttttttcatcaaacgtttcgcaaacttcggatgtaccggtcagccatttcggcagcgggattctttttccgcatatcaatagccattgctttcccgatgtgatcgtaagagagccgtcaagagatgcctcgaacgtcaaaacagacagcagcagatgaggtttgccgaagaaatcaagtattctattttctttctcgtcatatatcattaacgcatcaaagaaacgttttttgcctttaaagaaaaatgtacgattccattctattcctgtatgttgcgatttcaaaagacaagttctattttgtattgtaaatggaatgtctttgcctctttctgaaaagaagcatctgaaaaaaacacccagctttaacagcattctaaccagaaaagagcctccgcttatttctgacatcgttcccgtcccgctgaatgtatgagacccgtctaattggtaccgtttctgcagcttgggatgcagcaaatgatagttaataattgatttttcataaatcgaactcacaatgtcacttctttctctttcgttttgtgcgcctggcactggggagctgcaggctaagagcgccgcttgcagcggaaaacacactcaatagaacccacatgaatatttcggaacctagacaagcaaacccagcaaaaatacaagcctggacaccatgaatgatccattttctttttaaaggaagcagccacaaaatagctaagcctatctccgctgttcctgtcaatatgcttgtcttaacacctgcaaagccttgatagaaccaaaacaggctgaaaaacagacacatgaacacatagatgatagcagatcgaatgaagcgcttcggatgtttattttgctctacccaaagccttaatgcatcaaagctccaggcagtcgcccagccaagcagcggccgaaataataaacgatcaatccatcttcccagcagtccgtaggctgttttgtattggtactgtgttaaaaacgtcattttcccattttctctctgtatatacttccagtagccgcttccatgccgaatcagagataatggatgatcagagccaaaagccagtgaagaagacctttcagatgaacatttgttgaaaacaccgacggtttctcctgtacctgacacctttaatccaaagcctacccttgtttcgtaaagaaacttctgtttttcgcatggctgactattcaaatacgtaatatttgaaaaccggagatcccattccttatgcagtgatgggttttgtgtatattcccagagtgtatccagatcagatttcatttcgatttctacataaatcggtttctgcctcacagccccttctcccttctatttcaagcaattcctatattagcatattggtcgatttgaaaagtgtatatctctccaaaaaaagtatctttatcctaataaatgcataaaaaagagaagagaggtttccttctcttccttgggattcattactgagttttaaccgtgccgaaatgagtaattgtgacgttcacactgtatgtgatgtcggctttactgaaggtgtcatcccagttatttttcacccttttccataagtgaggatatgtaagtctaaaagattcatcaaaacccgcaacatctgctttataatcatgctgaattttttttaatacctgaccaactattttctttacctcgttttcaatagtcgtttcgagacgatctataaactgggtgtccaacgcctcttttgtgttccagttttcaaccaaatcgccttctgattcaatatcgacatggaatgaaatatctttcccttttacgattggctgaattctgcttttgattttattgatatcgtacgctaacgtctgttggctctttttatcatgacttttgacaactccgcctttcccttctcctctaatccatgtaatcccctcagtttcatattcatttaaggtgcctatcatttttttcgattttccgttgattacagctgctccggaatacttgaccgctccattcgccgcaaccacattttgcagtaaaaagctgctgccagaatgcagttttccaattagtttcgcgagtgtcatagggggaagaattctggaaactttatgttcattttcacctaatccaatcagccgaaatgccggaatttctccgttctctttcagctggagagcgtctcttgcttcccctttagcagataaaacaagacagctcagcctgatttcattatcacgaaaaaattgatccagcatttcgtcgataggaaatgtgtgcagcacatcttcactcatgacaacaacttttaaatgcgggctaaacacttctcggtcccgtcttaatgcaacctcacttccgatctgctgtaatgaatcccctgtttcacttatattaatgtacgctttttgcgctccttgtccgctaccgcctcccccgcttgtgcccgcgcctgccgctttttcattaacaaattgataggtcagcgtaatgttgtcttttttcggatagctcccgccctcttcttttaactctttttcagtgttcgtttcttttcctttatcaattgcgatagcgaatgtgagacccagatcttctatttcccgactgctccagcatcctgttacgcaaatcatcagcagacatactatgaccatagcaggcaattgacgttttagtttacttttcacctcttttcctccatttcgaaatgactaacagcaaaatcggcaaagcgccaaatatatacaaagcgatatgactgaccgtatcgcccaatataaagacgtcattttcatttttcggcatgcaagagaggatatatataacaggaagcagcccaaacatacatgaaaggggtttctttttaaaaacttgtgagactcccagggaagctgcataaaaagtgataataaacgtggcaaaaagctgcataatccaaatcacaagcagaaatgattcaaaccgttcaaatattaaaccaggtatttcaaaacttctcatcaggtcaagccccggccatgttctcgtcacaactccctcaactgatagtgcaccgatgaccataatcatcgtaatcatataaaaactggtcacaacgcctgtcccgatcacaactgctttcaccgcatttttcggctttttcataaatgctactaaaatgaacataatttctgaacatgtaaatgaaaggttcgttgtctttacacctctaagaaccggcatgattccatcacctaatacagggcgcaaattgttgatctcaaatatgcctaaactcatgagggctatcgttaaaaagatgatgaccgtaatcggaaaaatcatttcaaaaagccgtgcaatcggatctaggccttgtgtaattgaataaagcccaatccaaagaactgtcataatgatggcccaagaaggtgtcccttcgaggagaaaaaaatccacgatttcggacatgactctgacttcaaatgcaccgagtgccagaaaataagtaataaaaacaatactgatcagatgcccgagccattttcctacaatatgtcgggagtattcataaaaggtctccttaggatactgctggcttaatttagctataatcatcccggctattaccgctaggaccccgcctaataaaactgaaatccatccatcaggagattgtgtttgttctgttactgtccgagggagcgtaagaactccggcagcaagcatataattaatgatgataatcgttgcctgagcggttgtgattttactggttgggctgaacatgagactttatcaccatcctgtcgagttcatcacttcacccgttttgtattatctgtattcatcattttaggccggcgcttcatgactaaaagaggcattctgataacaaagtctttccaatcttttaagtgatagggcactgccggacttgcgtatggcacaccaaagctctttagctttacgacatggctgcttagcagcagataatacataatgactccaaacaatccaaacaccgccgcacaaaacatcgcgccaaaccgaagcatccgaagtgctatacctgtgctataatgcgggatggcaaatgaagaaattgctgtgagcgcaacaacaatgaccatgattggactgacaatccccgcctgcacagctgcttccccgatgattaatccgccaactatgcctattgcgggtccaattggttttggcaaacgaagccccgcctctcttaaaatttcaatcgcgacttccataaataaggcttcaatcagagatgggaacggaacaccttggcgcgtcccggaaattgaaatcgccagcttggtcggaattaacccaggatgaaaagaaataaatgatatatataaagcgggtgcgaataacgttatcattgctgcgatgaacctcagcaatctgatgagcgagctcgggaaccaccgttcataataatcttcaggcgattgaagcatcatgctgaaagtgactggaacaatcaaagcaaacggagtgccgtcaagcagaatagctactcttccttccattaatccgcttatgacgcgatcaggacgttctgtactctgtacttgcgggaacgggctcaaataattatcctcaattaactgttcaacgtagcctgactccggcaaatgatcgatctcaatccctctcactctttttcttacttcctcgactacttttggatctgcaatgtcattcatataagcgataattaaatccttttttaatcgtgttcctacttcaaatctctgcaatgttaattgatcattttttccttgctgtctcaaaagagctgtattcgtactcaactcttctgtaaagcctgtgcgcggccctctgacaagcgcttctgaaagcggctcctcgatacttcgattttgtttttttacagttcccagaagaaaggcctgcggtattccatcgatgagaagcgctgtcgaacccatgaaaacattcaacacgatatcactgattttctctgaatctatgacatcaccgattgatacgatttgattttttatctgtttcgaagttaaaatacctttgccggattgagaaatttcatcgcttacctgattaggttgattcatgactaacactgatagtcctttattaatcaagtcctgatcagacagtccttcaacaaagatcaatgccgctttcacatgtaattgagtgatttcaagctcacggaaatgaacgtccccgttatgtcctatttttctttttacatgttctaagtcgtatccgatgttaccggttaacacatcctgatcctgcttttcagctgtcgaataatctgatttatgctgcttctgtgttttgtactgattgttccgccacctcatcattgcaccttcttatacatgaatccaagtaaacactttatagattacatatggaacgagaaatactactaacgcttgaaaccacacattccagtcagtaagtgttgatatcatgttatccatctgtcagttcccctctctctaataggattatttttcccgtatacctattttttatgttcgtcttttttctcaataaaaaagcatgatgaacatttcatcatgcttttaaagaaatcaacctgaccattttgcataattaacacaaaatgagccttttagcagtctgggaaaactaaaattccagcttgaagctttctgcctgatctgaaacttccacaggaatccccattatcgttttcggtttggaaacgtaaacaaagcgcatttcttcctctaattgctgaaacgctttttcactaactaaaattctggccggcttccctggactattatcaatggctgctttgatttttccaagcataaaaaacctcctgttttagaaaatggctcatttactattaaaacaaaaatcgcaaaataaattggctgaacaggaatcccagttcaaacataacagttgcggctgcaaacaagaatgaacgaaatgacaacatacacctctctctctttttcgcgcatgcagaattctcccattcacagatcagactggcgactgacacgctgttcaacagcagctctagcataaataatgcacgctatggacatgatcttattagttattatatgattgaattgaaaaaacatcatatgtcaagaggtaaacgaaatggctcaaaacaacgaaaatgcattaccggatattacaaaaagcattactctggaggctcccattcagaaagtctgggagacagtctctacttcagaaggcattgccaagtggtttatgcccaatgactttcagctcaaagaaggacaagaatttcacttacaatcgccgtttgggccgtccccttgtaaagttttggctgttcaagctccaactgaactttcttttgaatgggatacagaaggatgggtcgttacctttcaattagaagacttgggggaaaagacagggtttacccttattcacagcggctggaaagagccgaatgaagtgatcggcaaagcaaacgagaaaagctccgtcgttcgcggtaagatggatggcggctggactggcattgtaaatgaacggcttcgtaaggctgtcgaagaataaaaaagagagaggtatctctcttttttgtttttttccaagggttatacttcacaatttgagtccatcaatcataaaacgtaacagttttagatttaccagagtaatcggtaacaaagaactcggccttgttattgctcccatctacaaattttccaatactgccaaaggtgtggcattctccgggtgaaaaatagtttgcccctacataatcatcaggattgtcaccgggatcatcctcatataagtgcagtgaaacagaaaaaggagtgcttcctgaaaggcacactctaaaatctcctccggtcgagtataccgtcggacttgagtaagtatatgtgtaagtccccaacttatcccactctccagcccccgcagttccggctttttctgcttgtgccgttaatggaaaaaccgcagccaaccctaaaacagacaaaaatccaactaccttagtgaatctcatcagctacaccactcctctatgtcaatgatagccgctacgtttgtatcatttccggcagagctacataattgatccagcctgcctcctgcttcttaggcaggtggcattggacattatattcagcagcagccgttttatgaatccgtctttgtgctggttttaaaatgttcaaaataaatgcattcccatttgtactgctatctcttataatttgtttaaaaggttgtacttcaatcagggggaaaaggatatggaattaagcttcacaaaaatactcgttattttgtttgtgggttttttagtatttgggcctgataaactgccggcgcttggccgtgcagcaggaaaagccttatcagaatttaaacaagcaacaagcggactgactcaggatatcagaaaaaatgactcagaaaacaaagaagacaaacaaatgtaggataaatcgtttgggccgatgaaaaatcggctctttattttgatttgtttttgtgtcatctgtctttttctatcatttggacagcccttttttccttctatgattttaactgtccaagccgcaaaatctactcgccgtataataaagcgtagtaaaaataaaggaggagtatatatgggttattacaaaaaatacaaagaagagtattatacggtcaaaaaaacgtattataagaagtattacgaatatgataaaaaagattatgactgtgattacgacaaaaaatatgatgactatgataaaaaatattatgatcacgataaaaaagactatgattatgttgtagagtataaaaagcataaaaaacactactaaacgccattaacatctcctcgtttttactttcccccggctattgccgggtcttttttgtttgtgcactatatgtatatttctgaagcttccctttctatgaaaaccttggtgactgaatctgaaaaagaatagtgaatatttagtacatagtttagttagttcataagtgagcgcattcaatttattgcagttacaaagaaacttttataaactctttgaggatcctacataaaaggagaggttttttgtatagaaacatcgtattttatctcattttactttgtctatttatatcagttgtcatgaaaagctttgaggtgattagaacaatagccaatgttatctgctttattttcgtattgctgtattttaaagatgaaatgaaaacatactcacgtaaagcgttagcaatcctaagtatttgttttcttttcttagtcggtatctgtgcttttatcattttacaaggacagacattgatgaaacgtcacctcttttttacaggcttggaaacgatagcgggcattcttttaataatcgtttctttaagcatttgtacttttattttgaggaaaatttcaaatcggttaaaacgaatgtgatctcattctttcctctgataaaggtatatagctttcagattggcgaagcgtttcgaccttacatcattcaaaatgaaatattttgtcgatttatatacgtaaatccagttccaaaataaggtataataaatggcgaaaccactatcaaaagggggaattttggtgaaaaaagtattgattgcaggtgcagtaggaacagcagttcttttcggaaccctttcatcaggtataccaggtttacccgcggcagacgctcaagtcgcaaaagcagcatccgagctgcctaacggaatcggcggccgtgtctacctgaacagtacgggcgccgtttttacagctaaaatcgtgcttcctgaaactgtcaaaaacaacgactcggtctctactccctatatttattctggctttagggcaacaagcggaactgaagccgatatcgggcttcagtacagcaaacaatacaacgtctggaagcccctcatgaaggttgggtccaaaaatgaagaaacgtacatcgaaggaaaagacaaattcacatacaataaaggcttccgccctggaagcacagtccaaatgacaatctataaaaatttaagcggcaatacgcgcatgaccctttggggaacgaacaatgacggctacaccggacggattatcacagaaattcaaggaaccaacatcggcacgatttcaaaatggaaaacacttgctaccgcggctgtttcgtatgaaagccagcgtgatgcgatcaaagcaaccttttcgacctcttttaacaacatcactatcgacaataaagccgtcactcctgtggtagatacacaggatttcgcaaaggtttcagttgcaggaaataacgttacgatctctgttaataaataaacgaagcagcaaaaagccgccagcattgtctggcggttttccttggagcatactggtcatagttcgtttcttcagctcttttgtttaaacctaactttaataagggtggaaattggtatgaaatatgaaaaaacaagtctttttggaatgattttagttattgtagcacttctaatatctatatattttatgtgtaatacaaatgcgttgatacctgctggatatgatctagctattcatggaattgtaatatctagaactgtaatgattgcttttactttgtatttagtttcaaagttaggatattttcttctgaataaaaaagattaactgtagagttaatcttttttatgtattatacgtgtttgtccttcaatttttattcatcttccagattgcttaatgaaattaggatacctgctatctattcactgcacaataaaaaggcagcattaaaccgctacctcaaataaaagcttgtccccatgtttatagttgattaacttgaaatcatcaatggtaaagtcataaaaatctttcacttcaggattgatccatagttcaggtgcttcaaactgttctctttccatttgaattttcaaattgtctatatgacgtgtgtacacatggcaatccccaatgttaaagatatattcaccaagctcataaccagtcacttgagcaatcatgcgctgcaacacattatactggaatacattgaatggatttcccaatgccatatcattgctccgtgctcttacctcaaggtggagtttcccatgtttaacgtaccattgtgtctcgtatacacatggcgttaaggccattgcgtctaattcatcaggattccacagcattgtaatgtgtctgcgtgaagatggattgttcttcaattgatgaagaagatagtctacctgatccactttttctccatttagacttctgtttttcttccccagctgaaatccatatgcatgtccgatggttccgtcttcttgtttccactgatcccaaatatggacgcccatcatgtttaaatcattaacatcattagatttcagctgccaaatccagagcaactctttaatggctgttttccaggcaaccttttttgtcgttaaaatcggaacctctgagttgtcgaatctcatttgcttactgattacacttagagtatgtgccggtgttccatctgagtcccacttggttcttacatcaaactcttcgtctgagattccattattgataatatcctttataattgaattgtattgtttatcgaattgcgtcatgactattcatatccttctttcattttcagttgctaagcataatttattacgaatgcaatattatcgcaaatactaagcacttgcagataaagtgaggatcttattccactcactgtgtgtttaaagaggagttaatccccctcttttacacctgtatttctccataacatagtctgtcacatagctcatagttaccgccagtttggtacatacaccgttgataacattgttgaggattatacgaaatggtttgatattgcggtacataaaaattcaaatagtcaggtgtttgtgtataccaaattggaaattgtctaaacacattaaatcctccaatagctttttctgatttaatgcattgtattttacctcaatatcaattgtcatttgtccatgtgcaattgggctttctttaaaataaattctctctaatttcattcatttgatcattaacaacttttttatgatatttggcagcggttcattccttatatgatctgtttctagccggttttgctgtttgtttttgatgtctaactctaaatccttcaaaagcagtgtgaaaaatcacatcatagagctcttgaatcttaaccataacgttcaaatattcttcaatgagaaagtccctttttacgtatactaatctctctatacactttactattattttacagtgattgagtgctctctctcgctcttattttcataaacagctatccgttttgtttttcagaaagtgttttaaacagcctctttttactattcttatttcatttgaccataccatatcatttaaacttcataaattaaattcgaataacataaaggaggaatttaattgggttattataaaaaatataaagaagagtattatacttggaaaaaaacatattacaaaaagtattacgacaatgataagaagcattatgattgcgacaagtattatgatcatgataaaaaacattatgattacgacaaaaagtatgatgaccatgataaaaagtattacgatgatcacgattatcattacgaaaaaaagtattatgatgacgatgatcattattatgattttgtcgaatcatataaaaaacatcactaaatctcttaaacgtctatttattccctggcgacataccgggggcttttttatgatatttatcgacgaactcagatttttttgtgctcatggctgctgtaaaattcaattattaatgaacacaagtcatttaacttggcttattattagtggcattactagtttttagttgccttcccctatttataaaaatttagataaaagtatttctttatagagatgcttgtttcatcgacaactcaatcctaaatgtggtaaaatcgataaaaatgtaaaaactgtaaatataataaaaggagcatctttatgtatataagtattataattttagcatccatgcttttatggggggcagttatccacgagctaagtaaaccttcaaaaaagcaaagcaccagaaaaattgtttctttgacatctttaggttctttatcgactttagttattactatttcactttttcaaaacttccctttttaaactttgtttttaattaaatccttcgtattaaaatattcattttatacataatatttatatgtaccttggctgaaacctccattgatcaatcacacagcatgaagacagccaaggatttattttgtttacttcgtacctgttgaaccgagtcctcctctatcctcgtttcccaaatgctcgacttcaaccaattcaaccgccggcattttcttcatgattctaaactggcagatacgatcacccttcttaatttcagtatcacgcaatgcataagcaggaaagaaccagaaatcgttgtctcccttatatgactcatcgataacacccattgaatttgtttgaataacgccaaagttcttatatgtacttgaacgagggacgacatgtgcttcgtaaccttcaggcagctccattgcaacacctaatgggacaagcttaaattcatcttttttgattgttacatcttcagctgcccgaagatcaatccagtctccctgctcaattttgctgattcttgtttgtgtttcatctagatacttgattttaatttgcattgtcatgtactagctcctttaatttttattgagtatcatacagtaaggcttgttcttgtgtcattttcatcagttataaattgaacgtcttcaaaatcatgctgtaaagcattgaagtaaagtttttcaatgatatttttgtttttacagtaaatcgaaacgtagctattatctgctatcaaaaggacaagttcgcaatcactgtcagcaaactcttcatatgtattgacttgattaaccatttttccatatggaaatgctttcagttcaacgaaaatggtatagtactgattcgtttttaattgttgctcaaaaactgccccctcaacaatttcgtagtcatgaaaaagctcctcatcatcgagctctccttctacaacaaaataagattccccactcgtttgccacctataattagctatttctaccggctgcagtattctccatagaaaatttccatattcattcggtatttgaaaactaactcccctattcatgtataccccttacttaaacgatttttgtgaatacgagtataattatatactctgatgttaggtttatggaacaaggaatcgactgccttttcaaccgattatcttttacagaatttcctcagcccttctcatttaaaaggttcttcaatgttcataacaacggtaagtatttcctgattagatttctcgttatcatctacccttagaaaaaaatgtcccaaaacaaataatcatttttgtaatcctcggtcgccgcatccattaacaccccacttacaagcctcatgtatcccgtacttgctattattcgaacattgataggcaccttctcgtatcacatggatttgctgttgaatgatttcaaataaagttgaataaaataagatcgaatcatccaacaattaacatttattcttgcggcaataggtggtatttataatccataagaaggaaggaagcgttgatgataaagctttgccgagaagtttggatcgaagtcaatcttgatgccgttaaaaagaatttgcgagcgatccgccgtcatattccacataagagcaaaattatggctgttgtaaaagcgaacggttatggccacgggtctatagaagtggcacgccatgcactggaacacggggcgagtgagctcgctgttgccagtgtggaggaaggaatcgttttacgtaaagctgggattacagcacctatccttgtgcttggttttacatcccttagttgtgtaaagaagtcagcagcttggaatataacattatcagcatttcaggttgattggatgaaagaagcaaacgagatattggaaaaagaagcgagtgctaaccggctggccattcatattaacgtggataccggcatgggacgattaggtgtacgcacaaaggaagaacttttagaggtagtgaaagccttaaaggcaagtaaattcctcagatggacagggattttcacacatttttcgacagctgatgaaccggacacaacactcacaaagctgcagcatgaaaaattcatcagttttctcagctttttaaaaaaacaggggattgagctgcccaccgtgcatatgtgcaacacggctgcagctatcgcatttccggaatttagcgctgatatgatccgtttaggtatcggcttatatggtttatatccttcagcctatattaaacaactaaatctcgttaagcttgaacctgcgttaagtttaaaggcacgcatcgcttatgtgaaaaccatgcggacagaaccccgaaccgttagctatggtgctacatacatcgcagaacctaatgaagtaattgctacactcccgattggctatgctgacggctattctcgtgccctttccaatcgcgggtttgttcttcatcgcggaaaacgagtgccagtggcgggaagagtaacaatggatatgatcatggtcagtttaggagaaaacggtgaaggtaaacaaggagatgaagtcgtgatttacggtaagcaaaaaggagccgagatttccgttgatgaagtggctgaaatgctcaatacgattaactatgaagtcgtgtctacattaagccgccgcatccctcgtttttatataagagatggcgagatttttaaagtatcaactccagtattatacgtgtagaacatcttaaaatgctgaatcaaaatccctctaccagagggattttgttttttctgaaactaaaaaaatccctcctataagaagagagattttcaacatatttatacctcaataactgattgttcaggagtattatgatcgtgtcgagaacgaaaatgctcttctaattcttcaagtgtacgcccttttgtttccggcatgaatttgtacacaaaaccgattgccaatacacctaaagccacaaatataaagaatgtaaaagacaaacctacagagctaagcaagatcgggaaagcaaaaccgatcacaaagtttaatatccaaaggaaaaaaacacttatcccagaaccaagtcctcttaacctttgagggaatatttccgctatgacaagccaagtcacaggtcctacacacccttgcataaaggcaagaaataaaacggtcaaagaaagcactacataaggaagtgccatagatccatcaagcacaattgagaaaatcgcaatcaataggagcgctgtagtcgtccctgccaaaccaatcaataatattggacgccgtctcacttttccgaccagccaaatcccaaatataactgcaataactgatatcagcccatttccaatattagcgattaaagccgcttttgtaccaaaaccagattctttaaggatttgtgtgccataatacataatcgagttcacacctgtaatttgattcacgatggcaacaccgattccaatccataaaagacggcgcagccatggtgtagaaaagtccttgagtgatgccttttctagtgctgtatctttttctaccgcttcttgaatttctctacattcagcttctgcacgtttatcttctcgaatttgtttaagaactcgcagcgcctcactgtttttgcctttggagattagccatcgggggctttctggtaccttaagcatactggcaaataacatgatagccggtacagcacaaatgactagcatgtatctccaaacatgtcccgtatttgccattgttacaccgaggatcgcattaaaaacatatgctaaaaattgcccgccaacaatcattagttcattttgggttaccatacgccctctcttttcatgcggtgccatttctgctaaaaaggccggcaccatcgccgaggctcctccaacagccagccccagtaaaaaacgaaagaccgccatgatgaaaacattaggtgctaacgctgttcccagtgatgccaggaaaaataaaaaggaaagattaaggatcattttacggcggccatatcgatcagccaatcttccgcataacaacgctccaaacgcggcacctaataaaagaatactcgtaacaagcccttctgtaacaggtgttaaatcaagctgatctggccttgccataaaaggtaaagctccatttataactccggtgtcatatccaaagagaagccctccaaaagttgctgaaatcattattaatttcaaccttcgatttcgatgttcattcatatccatttcccctgcctttaagaatacttaataagctctttcagtgtggatattgagtcaaaactaaagtcatctctatcttagattttcgcctctggatttgtaaccgtttacatttttaaccaatagaataaacctaagctattagttgttatgttgtagtaatgtctttgtcacattattgtcatttctcatattatcataattctaaaagcattttcagtcaatattattttcaggattatttatttccgctatgtgatggtgatgttttgatcatctcgttgtgaagttaactattggcaatttggagtgttataagttcccttgaagttttccattcacaaaaaatgtccatatcgttataatgatgatgtttaatcgcgaaaagagaaaatgataaagagggaatcaatatgaagaagattttgatcagtatgatcgcaatcgttttaagtattactttggcagcttgcggatcaaatcacgcagccaaaaaccattcagattctaatgggacggagcaagtctctcaagatactcactctaatgaatataatcagacagaacaaaaggctggcacgcctcattcaaaaaatcagaagaaattggtcaatgttacattagatagagcaatagatggagatacgattaaggttatttacaacggaaagaaagacacagttcgctacttgctcgttgatacacctgagacgaagaaaccaaattcttgtgttcaaccatacggtgaggatgcgtcgaaacgaaataaagaattggtcaacagcggtaagctacagctggaatttgataaaggcgatcgcagagataagtatggaagactgttagcatacgtttatgttgacggcaaatctgttcaagagacattattgaaagagggattggccagagtagcatatgtatatgagcctaacacaaaatacatagaccaattcagactagatgagcaagaagcaaaatcagataaactgtcaatttggagtaagagcggttatgtgacgaacagaggatttaatggctgtgtgaaatagaaaaacactgtttgttaaaaaaagcagcaaacctagcagaatgcagtttccaaagaatgagaaagagatgatggagagtctagttccattctgcttaacaagctaaaatcatgcaactagcctgtaaaatttccgctgtatagtaacaataaaaaacaccccttcacgtcaatgtgaggggttatttgtgtgttaacatccttcctatttcttcataaatcaagagatccctctaccgtcgttagcgcggtttcatacatcttacccattggcattcctaagcttccccacttcttgaagtgttcgctgacaaaatacggttccactcgttcgttttgtctgctggatactccaatactgtttaaaggttgcgataccttattctcaccatcttttcaaaagaaggcagccatgttatcaaaggcctttgatgatgattgatcattaattgttcttcggttgatctccagacaataacatcattagttttttcgaaagctcttcaaagctgtattgagatcctttgtgtgagtgtaaatgttcttatacaaatcaaatagtgttttatatttttgaacattttgcgcctttggataaaatgcagcagcctcacgaatgaactgctctgcacattcttcaagtgattcaaaccaaccgcttccaaaggcagccagcattgcagcccccatagctggcccttgttcattttctaacttaattaccctcgtattgaaaatatcagcttgcatttgcagccacgtatcatttttagctcccccaccaatagaaacaacagtatgaactgattttcccgcttcgcggaatagctcaattgattcatgtaaagagaatgtgataccttccattattgccctcaaaaaatgctttctattatgggctccatccattccgatcaagcttccccgaatagaagaatcagcatgcggcgttctttcaccaaccaaataaggagtgtatagcagtccattggctcctatcggaatagcttccaccccctgcaataattgctcaaacgattcgtttggtgcaaacgttcttttaaaccagtccaagctgtatcctgcagcgagcgtgacgcccatcgtataaaaagaatccttttttccatgattaaaaaagtggactttccctttaaagtctctttctttttcttcttcgtaggaaagtatgacccctgacgtcccaatactgcataatgtttttccggaagaaaggatacctgctccaatagcgccgcaagcattatctgctcccccagcgtacacttttgttttttctaatagcccggtcttcgcggcaacgtgcggaagcagcgatcctacacaatcatgagattcaacaagcggaggacaaatatctgcagaaataccaatttgattgcaaatatcattgctccactccttgcgagtaatatgtaaaagtaaagttcctgctgcatcggagtattcggtgtgaatgacaccggtcatacggaatcgcacgtagtctttcggaagcaaaaacacagcagtttttttaaaaagttcaggttcatgttcctttacccataacattttaggtaatgtaaacccttctaaaacacggttttttgtgatgtcaagaagatgatcgccaaatttctcggtcatccttatacattgaggcgttgttctggtatcattccaaagaattgcattacgtaacacctgacgatcttggtcaagcagtactaatccatgcatttgtcccgaatagcttatcccgtcaatatccttggcttgaacattggatatagaaaccaattcagccaatgcttcaattgtttgctgaacccagtcttcaggattttgctcactatatcccgccttctcttggatgagcggataccttttggacgtttctgcacaaaccttgccgttttggttaactaaaatggttttaacagcactcgttccaagatctattccaatgacatacttcattttttcactccttgcccttttaaaaaaccattcactctaaataaatcctaattatagaagttacccgtcataacaacaagcaataggaaaggaatcatgacgggtaattcagtgacttggtattgatagcaggatctggagcttatcctgttatacttctaaaatgtattggttcaatatcgcttttaatttctcctgtcttccagattcgtttttaattgatttatgatttagcgcatattgctcaagtgtgtggaaattagctcttccttctataatttcaagaccaatcccttcagtaaagctgcggtaacgatgttgaatcacatcttcaaacacacgatcttcgattaatttgtgggcaactttcaatcctcttgcaaatgcatccatccctgcaatatgggcatatattagatcatcaggctcgaaagaagatcttctgaccttcgcgtcaaagtttaatccgccgcttccaaggccgccattttgcaggatttcgtacattgctaatgtcgtagaatataaatccgtcggaaattcatccgtgtcccagcctaaaagaggatgaccctggtttgcgtcaacagagccaagcagaccatgtactcttgccatgcgtaattcatgttcgaatgtatgcccggctaatgtggcatgattggcttcaagatttaatttaaaatgattgtctaagccatattgcttcaaaaaggcaatggttgttgctgcatctgtatcgtattgatgggtggtcggctcttttggttttggctcaatcaaaaactgccctgtgtacccgatttccttcgcataatccactgccatatgcataaatctagccaaattatcaagctcaaattttaaatcggtatttaacaatgtttcatatccttcacggccgccccaaaatacatagttctcagcgccaagctcttttgctgtttctaacccttttttcacttgtgctgcagcatacgcaaacacatctgcattgcaagaagtcgcggcaccatggacgaaacggggattcgtaaacatgtttgctgtattccataatagcttaacgccgctatttctcatgtaatctttaatcatgcccatgatcatatctaaattttggtttgtctcttttagcgtactgccttctggtgcaatatcccggtcatgaaaagcaaagaatggtgcatctagtttttcaaacatctcaaatgctgcttctactctcatcttcgctagatccatgcctttatagtgatcccatggtctttgcatcgtagctgctccaaaaacgtctgtaccatcagcagtaaatgtatgccaataggcaatagaaaatcgcaaatgctctttcagcgtttttccgccgattacttcttgaggattataatatttaaatgctaaaggattagtcgaatctttcccttcgtaaaccactttgtttgcgcttccaaaatagttgattgaactggaatgagattgagccatgtgatttcccccttaaaaataaattcattcaaatacagatgcattttatttcatatagtaagtacatcacctattagtttgttgtttaaacaaactaacttattttcatcttatataacctcgtcagtattttcaatattttttttagttttttatgaacacattagatataataaagggaagattcgctatgtactatgttgatacttaatttaaagattaaacaaatggagtggatgaagtggatatcgctgatcaaacctttgtcaaaaaagtaaatcaaaagttattattaaaagaaatccttaaaaattcacctatttcaagagcaaaattatctgaaatgactggattaaataaatcaactgtctcatcacaggtaaacacgttaatgaaagaaagtatggtatttgaaataggtcaaggacaatcaagtggcggaagaagacctgtcatgcttgtttttaataaaaaggcaggatactccgttggaatagatgttggtgtggattatattaatggcattttaacagaccttgaaggaacaatcgttcttgatcaataccgccatttggaatccaattctccagaaataacgaaagacattttgattgatatgattcatcactttattacgcaaatgccccaatctccgtacgggcttattggtataggtatttgcgtgcctggactcattgataaagatcaaaaaattgttttcactccgaactccaactggagagatattgacttaaaatcttcgatacaagagaagtacaatgtgcctgtttttattgaaaatgaggcaaatgctggcgcatatggagaaaaagtatttggagctgcaaaaaatcacgataacattatttacgtaagtatcagcacaggaatagggatcggtgttattatcaacaatcatttatatagaggagtaagcggcttctctggagaaatgggacatatgacaatagactttaatggtcctaaatgcagttgcggaaaccgaggatgctgggaattgtatgcttcagagaaggctttattaaaatctcttcagaccaaagagaaaaaactgtcctatcaagatatcataaacctcgcccatctgaatgatatcggaaccttaaatgcattacaaaattttggattctatttaggaataggccttaccaatattctaaatactttcaacccacaagccgtaattttaagaaatagcataattgaatcgcatcctatggttttaaattcaatgagaagtgaagtatcatcaagggtttattcccaattaggcaatagctatgaattattgccatcttccttaggacagaatgcaccggcattaggaatgtcctccattgtgattgatcattttctggacatgattacaatgtaattttttatggaatggacagctcatctttaaagatgagtttttttattctaggagtatttctgaagcaatagtgacatggcaccttctcatatgaaaaaggagttctaaaatagaaatctcctttttcatgtgcaaattatttttctttataacgaaaatatctaaagtcggccggaatatgattaccactggtatcttggcattgcatccctacaaaggcccctgtgaagaatcctcccccacggatataatcatctgataattttttcgattccagtgcaatgtcaattttgtgccaatcttctttgttaaaagaatagaaataataatatttgtccttttcaatatttactcttaaatatacatactttacttcacgaggaataacaattttattatttaatggctgtgaaaaagaaaagttgtcacatattgttaattcaagaatgcgcccaagttcttcatcatgcgtgacttgaagagccgtccagttctctgtattgtagtaattcaccaacccagcggcttgttgaaaattttccggataaaactcaacagcagtttcggcttcaaaatggagactttgccagcgtctggctacaaatgcctgagtaaatgtcgaggtcaatgattcatgaccgaataatcgtaaatgatttggcgcttgagtcaatgaacctaattcattcgtgaatggaatccttaaagtttgaaaatttatatttaatgttgaatcctcaaattcatcaacttccgggtacgttgcttcaaatattgtttcgggtatagaaggtgcatctacctccaagcttccttcttttccacctactacatagggccattcatctttccagtaaagtttttgaatagctgtttctctgcccaaaggacagtatcctctctgctgaaaaattgaatcatcgtcaggatgaataggacgtcccgttaaatgagctaaataccactcatctgtatgtgtttgaacaatggatgcatgaccacatttttgcaatggatttcctgggtcatgccatgacgttaaaattggattatcgggatgaacttcatatggcccctcaatatttgcagaacgagcaattgtagcagcatgttcgtaccgtgttcctccttctgcagttaataaataataatagttcccgatatgataaagatgcggagcttctgtcagttttctatcagttccttcaaatataacttttggtttaccgattaatttttgctctttatcagaatattcctgtataacaattcctccaaatgagtgccgatcaatacggtgatcccataacatatttaataaatacttttttccatccgtatcatggaacaaagaagcatcaaaccccgagctatttaatttaatcggctcactccaatcaccattaatcgtttcacaagtaactaaataattgtgacaatctttccatgcgccatctactaccttaacatccgtatagatcagccaaaacttcccatcactatagcttaaacatggtgcccaaactccacctgaatttgggtttcctttcatgtctaattgtgaaactctctgtaatggatgtgcaactaagtgccaatttactaaatcttttgagtggtgtatctggactcccggaaaccactcaaatgtagatacagcgatataataatcctctcctgctctacaaatacttggatcgggattgaatcctttaagtacgggattggtaatcttcatttgggactcctcctcagtttattttcttttttaagccttgaaatcatcaatatgatccaaataaactttgtctctattctctaattctcgaaccatgtttttatattttttctcatctaagttatagaaattaatatcaattaaagctagaacaagcaagaacacgggaataatggttgttgtaattaaaatccccattaaggccgccggggtttgtgcctgatttgctacatatccaaacttatcaagaaccagacccggaacaactcctcctaaggccataccaaacttaaagaaaaatccgattatagcgtaaatgagcccacccattcttttcccagtcctgtactctccatattcaattgtttcaggaataagcgcccacatatatcccccggcagtgagacttccagcagcagcgattaatcgacagacaagtatgaggtaaacattacttggcggaacaaacagtaaagctaagaggcctataatattcagtaataatgcatagtttagtaatttctttttccccaaaaattgatgaagccttggaataaacggtaaaatgaccaaagcgggtaaacttcctatcaaaccgtaccacttcaccaaatcctctctttctaagttatacgttacgtagtaaatgccaaccgaattactgatggaattcactccaaaaataataataaagaaaatacttaatacaacaagtggacgattaacacgaaactgctcaaatatatccgtaaatttaattttctcttcggatttttgaagagtgacccgctcttttgtgcttttaaaacaaaagattaaaaggcacccgcctatcattcccaaaatacccatggttagttgccagccaagagactcgttgccggaagtatcgcttaaataagcagccagtaagggaacaaaaaatgcaacgacaagtcccccaagattcgcaaataacatgcgaacagaagttatactaacaacttcttgattatttctagtcattgcagaagttaacgcgccatatggaacgtttatcgttgtgtatgtaagcgacaagccaacataggttatataggcatatattaatttccccatatccgaaaagtctggtgttgtaaaacagagtattgccagtatgacaaatggaaaagctccgaataaaagatacggtctaaagcgtccaaatctgctgttcgttctgtcaactattgttccgataaaaggatcagcgagagcgtcgattattctaaccactaaaaacatagtaccggctgctgctgccgataaaccaaaaacatctgtatagaagaacaaaagatacgtagacactgttgcataaattaaattacaagcaaaatctccagacgcatatccaactttttcaaccatgctaatcttctttacattttcactgagcatgatttctccccttttcgatcctttaatatggaacagtgtgaaacggtataacaatttctcgaatttacggtcagtaaacttttataaaagcgctttcaaaacagtgcaaaaaaatatggtgatcagcaagcaaaaaattcatcttttttcgtcataccttatatacctggaaaaggataaaagcctcattctttcgtttcttatattgtttagctccattaaatcgaccctcttatcccccttccatccatattagtaagatcttatcttgtggataatgaaagttcatttcattagtttgttgatcaaacaaactaacttgacttaatattataaaatcctttcgactttttcaacatctttttcagaaagtttaaacagaatgaattaaatattgatttttgactgttttgttatattcagtgtctcagtccaaaacagattcttgtgtaaacacatgacaaagatgatctatgcgaaataaagaattggttagtggtaagttgcatttaagagtttgataaaggtgatcacaggatgtatggagactgttagcctagatttatgctgatggcaagcccggtcatgaattgaaagaacggaatggccagaatagtttatgttataagtccaaccctacatacatatatcaatacaggaaagataaataagaagcaaaaatagagaagctttcaaccggagtagaaatggctatttgactgtctgaggattaatggctgtgttaaacactatgatttttccttcaaacttattttaatcttaaaaattttaattgagactggaaacaaaagggaatacagaaattaattccgtattaatttattcaatatgttaattttactttggtctttatgattcttcttccttcttctataaccatctaataaagactttttataaatcttgaggtaatcatcaatcgttagcaaatgatatttcgctccgccatcttcaaaaatctctaggttattatagtctacatctgcaaatggttttaaatcctcaatgtaagaaatgcctatttttgtattagttttcttaaattcatgctcatgtaaatcaaccattttgtatccatgcagttccatcactttttttagtttttcccacttttcctctaaaaaaattaaaggaataaggagatcaatatcttctggggaaaagtctaacccagttaccttttcaagacctaaagatccatataataatggaattatgtctaactctttattaaacgttttagctatattgataaattcattatacaacttcattttacatccccattatttggtgattaattattaagattcaactggctcttgaattttcataagtccttcaatactttcatgcggtatatatctcaaagggttattttttcaaacatcctgaaagtcatctgtacaatatctaaaaagccttgaaaactgaattaaagaaaaacatcaaaatgataatggctagcacaacaacaatttcaaaagtatgtgaactgccatcttctttttctcgttctttcttctccctcatttgttccctatattttctttgtatttcatcctttttcctatccaccttactcgacccctttcaacataaagtaaagccaagcaattctgaagtttttttattccttcttttgacaagctcgaaaataccaatgtataagcgtaatgcctaatggattttaaactccaaataacaaagcccctccgataaaccagaaaaaaggaaatggaaacataattgcatttaagacaatcccatatacagcacaccgtttatttgtctttattgaaacgaacgctaaaatgattcctataggagaaagtaataatggaaaaaacaccggcattccttgccatggaattgacataaatcctgtaaaaaaattaataattaagatggctgagataattggaatagtgattgaaaaaacagctgcagcttttttaacattcatattgaaagcaagtctccgttctctttaaaaatagtagttttatttagttttgagaaagtttgtcaaaatctctttctttcatttcaggcagagtgatatcaatccctaacatttttattaattcttgtacatagctttttattgcaagcatattaaatgggaaatcgaaatcaagttcctctttaacgcttagaatatccattgcatacgaacagttatgctccatacccaaaagatcatcattaaagcttaatacatctttatacgattgatcagataactcaaagtgagtaactaaataaacactaatatggtttccaccttgagaatcaaaatccactaatctttcatcaagtactaataaaaatgcagatctctcatcatcacataataccatcttagtttcaataaccgtttacatcttgtatgtaaggccctcataatctaattctgcctttcctgataaatcgtttttaaaaaaagtattacatgcacttatactcttctacccagtcgtgatatttttcataaagtggacgtattcgtttgaaatcatgagctatgacttcgcatccgcggtcatcatagataaagaaaataatgtcttttgtaatgttcacaaagaaaacatcagggtaatcaatagagtaacctccgaatttcggtttttgtggaaaatcctcattactggctgctttaagtaattcagttacacgtaagtctcgaggtttgcataacagggaaaattgttgcatctcgtattcttcagctttattgatttcgaaaggatagggatatgtcttcaccataatttgattcaaatgatttttacattttagaaacggttgatacacctttaattttcttatacatttctctttctttttgtgcttatacatattcgtcacaaggaatatgtcatcattttgttcaaataattcattaaaaatgattgaggtttgttcatatacaatccgaaacatctttaaattcaattcttcatttgctttgagttgatagatattttccccaagacaaaaatggattcctgtgccccattgattatagatgctaggaattaattcgaggttttgaaacctttcctcaatataccctattaaattcattcacacattctcactttcggttaatcagatgattttatgtagatctaaaaaaattgtaattccttcctgtgattgtaactttagtataccattttcactctgagcgatcgataggaatacggtctttttggaaccccctaaaagataatgaacatctgtggcaggttcactttattctctgagttcaatgacatgttaagcaattcaacatagatcaatttttaccagaagggaataatcaaccactatataaagatattccttcacaaaaaatcctgacaatcatcaacaacggatcaaacaatcgtctggcaaacttaaatagggtcttattcccccgtgggcaaaagtgaaaagatcagttataaaatgattaacgctcgaatggtatggctgcgtatcaggtatcatccttagtgaactcacctaaaaacaattcaccggagctcattgaatcccatttaatcactgtcatatcactttatatatcaccttcatttaactaatatgttctaagtagagggtgataatttgtttgtattgccgcactcaataaagttcaattccactcttcctctaaaatagcgtaataatattcatcccaccattcattgccttttggaatacattttttaaaaaagccttctcttctcattccaatcttcttcataactcggtatgagggaatattctcaggttgacacgtagctataatcctatgtaagttcatttctttaaatccatattccaagatagcttgggctgcctcagaagcataccctttattttgataattgggattaaacacccacccaatttcatatgtatgttcaccaaaatacttataaaaaacaatatggcctataagacagtcttcatctcttagtatgacagggaatttttcagcgttatcacctttgtttttatttacaaatgcctttgcatcttcttcagtaaaaaccccttcaggtatatacttcattacattactatcagatgtatactcatatactgcttgccaatctttgaattcaaattcacgtatcaataacctttttgttgttatgtgcattaaagcaactcccctctaatatacttaatctttatttcaatatgaagacaacaataacctctttaaaactattcttattcaacaatattgcctcttgctagaacaactcaaggattactgactgtgaacaagcaatggaatatgattctccaaaataatccccctatccttctctgaggggtaatatggggaatttatgacaaaactaaagacgaagtaagatcatttactgtggatgcaactcgtaagccagattgcaaagataaaatatgtaagaattaaacaaacatcctcttacaataagtaagaggatgtttgttaccaacaagattgtttaatttaattggtattccttattaagctttttaagaagtgaaatttcaacttcgtattggcttccataaattctgcttattttttgcacttcttcctttgagccgaagaaaataactttaaaatcatcatttacgtattgaactacaaaaaaatcatcaaaatcataaaatgtatttttatttatcgaaataaaaccacttgattgagctgttgtttttacactaatccgtctgccatcactcacaacatcaaatccatgctgattagtttgacgtgccagagtgccgttggtttggattgcacaaatgaattcaccgattctgccaattaaatgcctcaattctgtaggcttacagttcaatacattcatttcatatctcaggatttggttatattcattataaaggtttacaagttgttctttactaatgatttcggcttgatcatttatttggttattagtaacagaagcttctcggagtgatttaacaccgtttacccattcgcctacgataacttccttatcttccccttttgattttctgaaaataagtcctgtataaagagagttttcacctaagtatttgtaagaacttctattcatatattcaaagaggtgcttattaaaagaaatccccttattataccggttataacaataatctgataaaataatgctatccggattagttccgtatttttcttgaagggttttctttacttcttgaggtgaaaccaactcattgatcttatttttcaaagcatccttaatttgctcgtaaattgtcattatacttccctcaaattgcagtttctttggttgttgaaattagtcataattttttcttttgccgaagtgttattctgaaaccagtttataatactcttggagattcggatttacttcccaatatttcgttccatttaaagacactagcatatcaaaccatatctcgaaattagaatctaagttaatcgcatcttcaatatcatcaattgagtctagatatagcatatagcctaatccattttttgatttgtttgtgtctatgacatatcttccatcaaaatgatatccaattaaaacgtatccctctgggaaatcttgaacctcattatattcaatgattccctctaagctaagtatttcaatcccatcaaacatttccatcccattgtgctgtaacaaaaactctttatagtcattagggaaagtaacacctagcttctgttctatatcgctaatttcttgaggactagcaggatctttgaaatgaaaagtagcatcttccatgacatatcctccatgatgaaacatagggaatgtaccatatttagaaactgctttcttaataccatctagtgtcatgtgaactaacttttatttcttccataaatgctcctcctccttaaatcatctcactaaattttaccacacagaacattaatagataaatttaaaagggacataaactgtttattaagaaacaattttactcataattaaagcaggattagtggtgaacaaaatgtaagtgttacgtgctgttttaattactaccctatctgttgagccataaggaaacccaatccttactgcgcttttctcctctcccccatagtttggatcaagaaatacatcattgatttctttgattggaatttcaattttggatagctgccaattgataattaagttttcatttgatttttcaacgttgattccaagcataaaaacattccccttttgactatgaattcagtgaaacaaacacgctttaaaatttattaaatccaaaaagtaatacttacgggaaatatgactataagcaaaagagccctttcaggcccttatttttcttttacccttggtatgaatttgttacaaactcttttgctttattagcaacagcttcccaagtggcggcagcatgatcaagatccgcagaaagcttattgatatcctcattctcaaacccttgggcgagtgaataaaattgatttgctatagaatgccagatgccttcgatttgtcctataaactccttagacttttctgcttgggctattacattaaccaggtctatattgatactgtgaagcatccccaaaacttttacttctaattctggaatctgtatataatcttcatcgcttggactttgatttttctgtttcttgagtaattgacttaaagctttccacacagtattgtcctcctatgatagcttctttagacgtgcctctatggaaatggtcatttggtgatcagcttcacgaaatgcctcagcaaatgtttcaattccggtatcctagaaacatggcgttagataatcatgcccaccgatgcccccgctggtggattagttgcaagcataaacattctgcgatttatcaccgaccttgtcaaagggatgttaaataaaaaaagaaccttaattttcccattggcttattggcttacttttgaaaatttataaattattattatattgaacagtgttggtatgatgtatacaagaccagttccaagtagacctattactgaactagcaattaataatatgctgaagactggtttattatttgtctggattgaagcaagcatggttataattcccgccaaagcacctaaaaaccataaattccccaaagtgtaagagtcatctataaccgcaaacagttgagccagtacagaaaaaaccgctcctaatcccccggagaagatagtcaattttttcatagaaatctcctttttgaaaattgatttagatttcaacgtaattatggattcatttggttatgatgtcaatgataaacatctaccttactcatcttattattgctggtagaagtattgaacaatggaattatcacagaatttgtcgaattatttatgcgtattgcttccttaagcgtggaattatttccctaattaaaaatttagtacatagaattattagtgacatagactaaaagtgaccctgctttttagcagtgccgctccataatttattacctattaacataaaaaatcccctgacacttttagtgccaagggattgagatattaatactgagacatatactgttcgcgttcccaaggatgtacttgcgtgcggaacatatcccattcgatttcttttgcttcgatgaagtgttcgaataggtgctcgcccagcgctttgaccatgacttcgtttgatttgaattcttctagtgcttccgcaagtgttgctggaaggtcaacgattccgttttccatgcgctcttctttgctcatcacatagatgttgcggtcgattggagccggcgcttccagtttgtttttgattccgtctaatcctgcagcaagcaatacgctaagtgcaaggtatgggtttgcagctgggtctacactgcgtacttcaacacgtgtgctgatgccgcgagaagccgggatacggataagcgggcttctgttttgcgcgctccatgctacataacaaggtgcttcatagccaggaacaagacgtttgtaagagtttactgtcgggtttgttactgctgtaaagcttgttgcgtgcttcacgatacctgcaatgaagtgcttcgctgtttcacttaactgaagatctgcgttttcgtcaaagaatgcgttaacaccatttttgaagagtgatagattgcagtgcatacctgaaccgtttacaccgaacaatggttttggcataaatgtcgcatgcaggccgtgtttacgggcaattgttttgacaactagtttaaatgtttggatgtcatcacaagagcggactgctccagcatatttaaagtcgatttcgtgctgaccaggtgctacttcgtggtgagacgcttcgatttcaaagcccatctcttcaagctcaagtacgatatcgcggcggcagttttctcctaaatcagttggagctaagtcgaaatatccgcctttgtcgtttagttcaagcgtcggctcgcctttttcgtccaatttgaataagaagaattcaggctcaggcccaaggttaaaatcactgaagccgaggtcttccatttctttcagaatccgttttaagttgtttcgcgggtcaccttcaaaaggtgtgccatccggattgtaaatatcacagatgaaacgtgctactttacctttttcagctgtccatgggaagataacaaatgtatttagatctggatacaggtacatgtctgactcttcgatacgaacgaatccctcaatagaagaaccgtcaaacatgactttattatcaagcgcttttccaagctggcttacaggaatctcaacattcttgattgttccaagaatgtcagtaaattgaaggcggatatacttcacgttttcttcttttactaatttttcgatatcttctctagtgtactttgccatttggtaaaattcctcctcttaaaaggtaaatgtatatagcaaaacagttgctaacggattaatgaaagaagcgggacatgtcgccttgacggaatgtattccctctttgaaaacggccggcttgcatgagctcgtttttcaggagctgtctcagttcgtcatcggacagatcatgtttcattggttttttcgtcttctcgttttgtttttgttctggctcggcttcggctttcgccagaatctgtttaattcctgccatgtttacaccttgttctatcaggtgcttgatttctaacagtttatctacatcatgaaatgaaaataatcgtctatttccttcacttctggctggaaatatcagtccattttcctcataatatcgaatttgtcttgctgataactcagttaactgcatgacaattcctattggaaataaaggcattgagcggcgaatattatcactcatctcaatttcctccttttcttaacttagtttcattataggtgatgttatattatgtgtcaatacgatgtaaggattcttaacatcaaatccagagaaatttttaaaaaatttaaattaattgcttttgcatcaatgaatccactgcactgcatatggcattcttcacatgcgaataggttaatcctccctgaacatacgctacatacggcgggcggatagggccatcagctgataattcgatgcttgctccttgaataaacgtccctgctgccataatgacatcatcctcgtatccaggcatgtaggctggataaggcgtcacatgagcattgattggcgatgcaaattgaatagcctggcaaaaagcaatcatcttttctctgtcagaaaactcaacggattgtattaaatccgttcttttcgcatcccatttcgggtttgaagtgaagccgagtttttcaaggaatctcgctgtaaacaccgctccctttaaactttgagacacaacgtgaggcgccaaaaagaagccttggtacatttcttggagcgagtaaagagatgcccccgcttctctgccgatgccgggtgacgtcatacggtatgagcaagcttcaatccatttcgcttttccgacgaggtagccgcctgttttcgcaaggccgccgccgggatttttaatgagagatcccgccatcaggtcggctccgacatggcaaggctcaagctcttccacaaattctccgtaacagttgtccacaaagacgatcagattttcattgatttcttttacaaaacggatcatttcttttatttcactaattaagaaagaagggcgattcgcatatccttttgagcgctgaatgccgattacttttgtcttcggattgatcgcagcggcgactgcatcatagtctatctttccgtctttcgtcagatcaaccgcattatagccgatttgaaaatcctttaacgaaccagcgttttctccacccctgacgcccacaatttcctctagcgtatcatacggcttgcccgtgatataaaggagctcgtcccccggtctgaggacaccgaacaaagcaattgagatggcatgtgtgcctgaaatgatttgcggccttacaagccccgcttctccgccaaacacatccgcatatatgctttcaagcgtgtctcttccgatatcatcatagccgtatccagtagacggcgtgaaatgagtgtcgcttactttgtgttttctatagctttgaagcactctccactcatttcgctcgctgatttcttctatttgtttatgaatgccggcaatgtccgcttccacttccattgccgttttcttcaataattctccgtgtgttaatgtgtcaaacatgtctttatatttccttcctacatatacttctttaattcaccgatgatactttgctcttcttggacatagccggatatgtcatactgttcattttcttcattaaaatagaagcggtctaccatcgtttccgatttgattctggaaaggagcttcccttcacttgccggcacatgtgcttcaaaagacgttaacagttcttggcgcaaatagcgctgaatcgcttctttaaaggctgcagcgtcgtcctcaaatttcgcactgaccataatgtgatcccttccggcggtcggtataaaatcaggcagtttttgatcacgtttattgtaagccgtcagcatcgggatatcatctgcttcaagctcctcaagcagccgaagcactgttttttcatgtcccgcataatcctcatttgaagaatcaattaaatgcagaattaaatccgcttcttttacttcctcaagcgttgagcggaatgcagcaatcaatgtcgtcggaagatcctgaataaatcctactgtatctgaaagaagaacactgtagccgcttggcaggaccatttttctggtcatcgggtccagcgtggcaaacaggaggtcttcttcatagctgtcagcactcgtcaggcggttgaaccatgttgatttccctgcgtttgtatagccgacaagcgcaatttgaagcacaccgtttttctttcttctttcacggtatcggcttctatggcgaatgacagtggaaagctgtgtgttgatttcatgaatgcgatttctgatatggcggcggtcggtttccagtttcgtttccccgggacctcttgccccaattcctccgccttgccgggaaaggttgatcccttgtcccgtcagacgcggcagtgcatattgcagctgagccagctcaatttgaagtttgccttctctcgttctcgcccgctttgcaaaaatatctaatatcaattgcgtgcggtcaatcatcttcacttcaattgctgttgccaatgacttcagctgacttggcgacagttcatcattaaagatgaggagatcagcttcaagctcttccacgagtgccttcagctcttctaccttcccttttcctatatatgtagcggcgtcagccctgttccgtttttgtgtgacgctggtcagtacttttccgtctgctgttttcgtcagagatgctagctcttccatagaattttcaaaatgctcatccgtgatatgcggcagctgacatccgactaaaatggctttctcctgaatcgtttcttgttcgttcaaatggatgttcctttcttttgcatattgggcagtagtattatcataccaaaccctgcatgtgtataccacaaatcgattgctttgaaaagcggaaatacgagcaaaaaacagacctctcaaaaactgagaggtctatgcagatccagatgcttcttctttaatggaaagatcttggcttttgatggtcatcaagtcgctttttaagtattggtctcccattaaaagcctcatggcttgtgctctgatcgatttttcgatcacatttctgacaaaacgtccattgctgaatttaatgggacttgtcgtgcttttcactgtcattaagtaatctttcaatttccattccgcttcttgactgagctggtattccctttcatcgatcattcgtttcgcaatctccatgagctgggtcacagagtaatccggaaaatcaatggagatgggaaatcttgattggagtccgggatttaacgagagaaaatgatccatttcccgtgaatatccggcgagtatcaaaataaactcatgctgtttgtcttccatatgctttacaagtgtgtcgatcgcttctttcccaaagtccttttcgccgcctcttgccagcgagtaggcttcgtctataaacaaaatgccacctaatgactttttgattaaatctctcgtcttttgggcggtgtgtccgatatactccccgaccaggtcagcccgctccgcttctattaagtggccttttgacaggacattcatttcaaagaacagcttgccgatgagccgtgcaaccgtcgtttttcccgttcccggatttcctttaaacatcatgtgcagcgcttgctttccaaccttcaagccttgctccgcgcgtttttggttcacaaaaatccaggcgtatatttccttgatgttgcgtttcatttcctccatcccaactaatgcgctcatctctttttcgatttccttcaaaatgccgtgctttgcttcgtttttttgcaatgcagcctgatattccgcctctgcctcagcattcgtcagcacctgcttttgcccgttcagaataatgttgatctgtccgttgtttttataagtcacagcgcgctccaacatcttcacctctctgttctctctatatgatattcaagcggatgccgattgtgacaaacgcctatcatgtgtcgaaacaattgcttttttcgggaacaataaggaatcctgcgctttcccgagaaatactttatttcttattgtattcacggacatggggtggacaaaccatgagattttgtttttaatcattttgtcagagtattatagtgagcttctttctcattatttctttttcatacaacgggctgatttttgtacgaaacgtattacccgccctaagatacctgaagtgtttttctttttttcgatttataaagcggtgtctttaatgaaaggagctttcctcatcaatttacgttttaaatgcttgatttaatatgaacgcaaagcttaaaaccagcaggaatcagtgcaggttaaccgaacccatagtacatacaaacatatggcgtatgcacagatttcatgtcggaccgtatctgttgtcgcttcatgttgaattgtgcgctttcccgagaaataatttctggatgtgaaagggttatttcctcatttttcagttgaatgataatcgtacaagcagaagccgtgttttttcatatcctgtaatgaggtgatgaaaaatggttaaaatttttattgatcctggccatggcgggtctgatccaggcgcaacaggtaatggccttcaggagaaaacgttaaccctgcaaatcgctttagccttacgtacgatattaactaatgaatatgaaggcgtttctctgctgctgagccggacaagcgaccaatatgtcagcttaaacgaccggacaaatgccgcaaataactggggagcagatttctttttgtccattcacgttaattccgggggaggcacaggttttgaaagctatatttatccagatgtaggagccccgacgacgacttatcaatcgacaattcactctgaagtgatacaagctgtcgactttgccgatcgcggcaaaaaaacagcgaacttccacgtcctaagggagtcggcaatgcctgccctcttgaccgagaacggcttcattgataccgtttccgatgcaaataagctgaaaacgagcagttttattcaaagcttagcgagaggacatgcaaacgggctggagcaagcctttaaccttaaaaagacttccagctcagggttatataaggttcaaatcggcgcatttaaagtcaaagcgaatgccgactcgctcgcaagtaatgccgaagccaaaggttttgactcgattgtccttttaaaggacggattatacaaagtgcagattggcgcattttcatccaaagacaatgcagacaccctcgctgccagagcgaaaaatgccggctttgacgctattgtgatcctagaatcatagccgagacggggacgagcgtctcataaaaaaacccggctcctcatcgcgagaaaccgggtttttttattcaagaatatcaacaacaaactgtgaccatgtttccagacggttgtagatatcatcctgttttaattcagaaactttcatccatttacccgcaatttgttctttctccttcacttccacttgtgcgccaggctttaattgaagcgcagaaagaataccgatatgcactttgccaacactgttttcatcatcattgatcaatcccagtgtgacaatcgcctgtttatcttcttcatttatttgcagttcttcctcaagctcacggtctgtgttcagctttaagacttcagcaaatgaagctgccccttcgatggcgttcatatggccgccaaaaccgagagaaagcttgttgtgcagacgtgattcaccgccgccagccagccgctcgtaaagaaaaacttcatcttcacgcttaatgacgacataaggtatcggctgcttgaaacgcggatcttcttctgcgtcccctcttctcatttcacgataggccgcttcaatctgagccatgatttctgctactctgctatcttcactgtacacgccctggaaggttaagctttcttttttaaacacatcatcgcgcggggcaactaaaatcatttcgtccatttttcccatgggtactgcgtcctcctcatttgaaccttcaagccgaaaagagcagatattatatctgctctttttcatcttcaaaataaaagtcatcatctttgagcggctcaactgtcgcttttttatagccattccccttcatagagaagaagtcatgcgattttgtttttgtgtttaatccgtttaaaacgatcggattaatgtcttcctcttcgaagtatggatcaaatccaaggttcatcagcgctttattcgcattatagcggatgaatttctttacatcatgtgagagcccgacttgatcgtacaagtcctctgtatactcaagctcattttcatataactgattcaggaggtcgatcgcaaattcacgaagctctgcttttttctcttctgtctgtttattataaatttcctgagcaaggagaccgacatacacgccgtgaatcgcttcgtcacgaaggatcaggttaatgatctcaccgctttgcatcagttttccttgtccgtagaaatataacggataatagaaaccgctgtagaaaaggaagctttccagatagacggaagcaaccatggctttgaacagtgaaatttcatcatctttttgaatggctttgtaaagcccgacaatcatttgcgcttttttctgcaaatatttattttgtttaacccattcaaatacttcattgatcgtttcagtcggtgcaagggtcatgaaaatattagagtacgacttcgcatggacagcgttctccatcatcgccataaagttcagcaccgctttccgctggtggccatctacgtgttcagccacgatcggcatccccgtattcccctgctctgtgtcaagaagcgtaagtccggccagtaccttcatataagtgtcctgctcattttttccgaggtacttccatgtgaggagatcgccgtttaaagcaatctcttccggaagccagaactgtttcacgttttggttatagaacatttgggtaaaatcgtcttcatgctttgaccagtttgctgcgtcataaatttttgtcactataaactctcctttaatcaaacaacacaagaaaggcagctgtcttgcccagtatctttcgttcttgcatagtaaatggttttaattcctctatgatgtgcatacagatcgattcggtttaaatctcgggtcgtcattgtgtcttttaagaacaatgtaaagctgattccctgatcaatgtgctgctggatagtggcgatcatatccacaaccttgaacatgtccatatcgtaggcttctttatagaagaaccagttattagatgcaagcccaggcattgggtagtacgtttttgagttgccgtatgttcgttcttcaatccgttccataatcggcataacagacgccgtgcttgattgaacgtatgagatagagcctgtcggcgcaatgcataatctgtagctgtgatacataccgtgttcagcgacaaatgcttttagctttttccagtcctctgtcgtcgggatatgcataccttcaaacagattagcgattttttcgtatttcggtgagaaatcagttgaaacgtatttgtcgaagtattcacctgtcgcataggttgatccttcatattgatcaaacgtttcgcccttctcttttgcgatttccgcagaacgctggatggagtagaaattcaccatcataaagaacgtgtttgcaaagtcacgcgcttccggactttcatacgcaatgccgttttgcgcaaggtagccgtgaaggttcatagcaccgaggccgattgatttcatcgctttgtttgcccgtcttacagcaggcgcattacggatgtctgttgtttcagacacgtgtgttaaagagtctgtcgcaagcttgactgtcttttcgattgatttatgctccatgacattgagaatgttaagcgaacccaggttgcaggaaatatccagaccgatttcatcttcttcatcatagtctgtgtatgaagaaacttgagatgcctgcagcacttcagagcaaaggttagaaaatttgaccttggaaatatggttattcgcatgcactttattgacgttatcttggaacatgatgtatggatagcctgattcagaacgaagcatcgccaatttttcaagcagtttccgcgggttgattttttcctttttcacccgagggttgtcgacaaacttgtcgtacatttcgttcatgtccatctcatccatgtgctggccgtactctttataaatcgtgtgcgggtagaatacataagccgctttgtcctcgcgtgcaagctcaacgaacttatccggaatgacaacaccgatcgaaagcgttttgacacgcacatcttcatccgcagaaatctttttcgtatcaagaaaatcattgatatcgcggtggaaaatgtttaaatacgccgcgccggagccttgtctttgtcccatttggtcagcgtaacggaacgcgttatcaagaagcttcatgacgcctacaacgccttttgtcgcattctcaacatctttaatggcttcacctttcgcgcgaagcttggacaggttaagagaaaccccgccaccaagcttagaaagctgcatggagatatcgattgctcttgaaatgtcatttaaagaatcattaacttcgagcaagaagcagctcacaagttcaccgcggcgttttctgccggcattcaaaaatgtcggtgtgctcggctgatattcttgattgatcatcaggtttacatattcttttgctttctcagtgtcgccgttagcgaagaacagcgcaacaattgagatccggtcctcataacgctcgaggatttttttcttgtcattcgttttcaaagcatagtcattatagaatttaaacgcactcatgaaggaaggaaaacgaaacttcttagcgtaagctgtcttaaacacttctttaatgtcttcaaaagaataaaggcttaagaattcctcttcgtagtattggttttcaaccaaataatccagcttctcttttaaattgtgaaagaagactgtgttttgattgatataatctacaaaatagctatgtacagcttctttatccttatcaaactggaatttcccatctttttggatcatgatttcgttatttaactggatccattttggcacttgattttgtgacaactctttctacctcctgagtaaacaattcaacgtctttagatgtgccgctgagttcaaatttgtgcaagatcggcacctgatattgtcttgaaatggtatcggcgctttttgcaaagttatcgccccatactttgttgccgctcgcagcgactcccaataagagatgggcgtatttttcgagaaatgattgtgttgatgccggtacctggccgaagtttgtcgtgtaggtgaccaaaacaaacggagtgtccacgtggtccatttcgtccaccttgcgtatctgctgaaagcctgttttattcacaaaccgctgaacattccctgttttcgaatcaaatatgatttgtaccacgttttatcacgacctatcaaaaaatatgaatctctcatcactaacactatatatagtatactaccctctagcaaaaacacaatatatagattcgtttttatgaaaaattcatattttgatcaaatcaggcaaacgggcagactcattagggcccaaaaaagagagcagaacgagaatcatctctcgtcctactcggggtgtcgtttttagccgatgtatatcataacatgaaaaaaaactgcttagtagtctagatttttttttcttaagctatcacagcatttttcgctctctactgtttcttctatttcaacatccgcgccgatctcttctaaaaccgccttcaaagcagtgataattgacgcttctctgattaattcttttccgttcacaatgatacttgttccgtattcatagcaagaatcatcttcgcaaatttcttcccaatgattcacgatcactttatgcttcatgttttcaccctctgtttgatctgtgtctgtatttagtttagcggctggcatccgctttgtaaattcgaatgcttgtgaattttattcaagctcatcatccgcgtattctttcttcagctttacctcattgcgggactcattatactcataaattttgatatagccgtcctccataacgccaaaatggttatgttcaagtggaaacgaggtgggctgaggcgtttcatagtctgaattgccgttgtctgtttcaataatggtatcttgattcccgcacgccccgaacagtaaaaagacagctatccatacaagtgcaatcctgattcgtctcagttctgcttcactttcaaacaagatcgatcactcccaaattcattttatacataatataccatttttacttccgtatgttgttctcataaaaaaagaccgtgccttggcatggtcagcttacacaaaaagcttggagcaaaagtggattcatgttaaaaatggccgccgggaacccccgacagcctttcctcatgtcttgacatggcattttttgatctattcgagttcaagctggacgtttttttgcggcgcaaacgttgagatcgcatgtttatatataagctgctgcttaccttccgattccaacaatacggtaaagttatcaaagcctttcacctggccccgcaactgaaagccgttcagcaaaaaaacagtgacatacgtattttctttccggatttgattcaaaaactgatcctgaatattaatcggtttcatgtttcgtcctccttgattctctatatcatacagtttcgattaaagttcgagttttcctgctatatgtgtgaaaatttccttttttttcagctccatatcaacaggcggtgtcatatcgaaccatgtgacctgcattttgttgcgaaaccacgtcagctggcgtttcgcataccgcctcgagttctgctttagctgttcgacagcatcggaaagtgtcacaaaaccgtcaaaatatgcatacagctctttatagcctatcgcctgtattgattgacagtctctcacgttcttgtcgtataagcgtttcacttccggaagaaggcctgactgcatcatcaaatcgacccgctgattaattctttcgtaaagcgtgtctctatccattgtcaggccaattaacactgcattgtacagaagttctcgtttttgttccttcaaatgctgggacatcgtttttccggacgtatgtaaaatttccagtgcgcgaatgactcttcttgtattattcggatgaatcgcagctgctgcctcgggatctgctgcagcaagtttggcatgaagaaagtcagcgccttcccgctcagcagccatttgcatgctctctcgaaacacgggatcatttgcctcttccgtaaatgtataatcgtaaagcacagattgtatataaagccctgtaccgccgacaatcatcggaagctttcctctatttgcaatctcgctgattttatttcttactaagctttgataatcggcagtagagaaagagtcttggggatctaaaatgtcaatcagatgatggggcactccctccatctcctgttcggtaattttagctgttccaatatccatccctttataaatctgcatcgaatctccgctgataatttccgcgtttaaggatttggctagctgaatacttaaattggttttccccactgccgtcggtccgactaaaatgacaacgggctgcttcgtattattcaatatgtatcactctcttttataaatctccccccattatagcattcaacatggacaaccacctatccattttgccctttttttgcatcggtaaacatccttctaccagccgagcggctcattgccgacaatttcccttgtctttcctttcagggtatgacgatgcgtttttcttctgtcatctccgggatcgtacacaacccctccgtactggatctcaatcggctcgttataggccagatacgtcgtttcttcgatttcatgataatgtgtgccatctgctaagggaatcgccggtcctgagattccgtaataccgatgaaaatggccgttttcaaatgaagtgatccctgtatagtaatgtgtatgctgatcggtatttgatccgtttgccggctgagtaaacccttcgatgagatgataatggccctgttctctcgttgttttgacatgataagcatgtgcgtggggcggtgcttttgaccagtcagactgatacaggcccaatgtgttcacatcctccttttcctcgattcgcccaatcaaatccgggcagggtgaatacactgcatcatctacactttattacaggaggaaagaaaacatgaacgagttagagcatttcagccctgaagatacaagaatatttggaaggccgttcggattcgggagaccatttgggtttggaagaccgttcgggttcggttacgggtttggaagacccggatttggttatgggtttggccggccattcggattttttggaggaccgtttatcggcggccttgcaggcgggcttataggaagcgctttatttaatccttatttgtatggcggatacccctattatccgtatgccccgttccctttttattattaaacgcaaaagaccccttaaaaaggggtctttttaagtgtgtgaaaatgaatctcttgactcatacataggcatacactaatatttttctagctgaagttttttttctaatctaaaaatatagtgaggagaattcatgatgttgataggatatatattcctcacgattgccatatgttcggaatcgataggagcagccatgctgaaagtatctgatggcttcaaaaagtggaagccaagtgctttggtcgttattggctattccctcgccttttatatgctgtccctgactttaaaccatattcccctgagcctctcctatgcgacttggagcggggcaggcacggtgctgacgacagtgatcggagtaaaatggttcaaggaagatctgaatgccaaagggcttatcgggattcttttattactatcaggggtcgtgttacttaattggccgtaaaggagtgatgaagatgagaggattgctttatttggctctcgccattgtatctgaagtgtttgggagcacgatgttgaagctttcagaaggatttacacaagcctggcccattgccggagtcatagtcggatttctttctgcttttacgtttctaagcttttctttaaaaacaattgacttatcaagcgcgtatgcaacatggtcgggcgttggtaccgcgcttacagcaattgtcgggtttttgctttttggcgaaaccatcagtttaaaaggtgtattcggtctcacgcttgtcattgcaggcgtggtcgtgctaaatcaatcgaaagcccacgctgaagataaaaaacagacggcctgtgagtgaccgtctgttttctttattctccacccagtttcacagaggcttcaagctgcagctcgacatttccttgaattgcacgcgaaatcatgcatgacgactccgcttttttacaaagtttgtgcgccaatgcgacgtcgtcttgtgaagcatcatgtttaagcacgacagagggacggtgaatgatctttttgtatgtaaagactccttttgtaacgttgacaatgccttctgactccatctgtaagtcttctttttccagcccgcttctctccatcatcgctgcaagtgtaataatgtaacaggtcgctgccgccccgagaagcatttcatctgggttggtcccttctcccgggccatccatttctttaggaatggaaatcgatgtgatcaggtttccgctttcgatcgtaccgacatcattacggttacccggccagttcgcttttaaataaaaatgatgatctgccattgttttgcctccttttttatcctatttcagtctactgatcttctcttattttgtcttctgatctgcttgttacgaatactctttttccaggacacctttgatcgcactgacataagcataaaattcactgttctttgtgtattttctatttttataataaaaatcatcaaaaaatgcttctctctgctcacggctgatttccagctggatacttagccccgtttccccttggttattaatgttttcggcattcaatccagcaagaccgcttttagacgacgctaactcagcggaaaaccctctccgctcaagggctctcacaatcattttcgcccgctttcggtctgttccccctacaagggtattcttgttctctcctttatatccgtgaaaagccaccacatattgatgctccttgattttcttttttgccaatggctcatcaaagttggtgcttgtaatgtgcagtgtttggttatcatgggacttcaacccttcaaataggtatgtagagtattcattattgaaataacgcacaagctcacttactccgccttcaattcttccgccatgcggagacataattaagactttgcttccttttttctcattatatgaaatatcgtaatcggctgggctctcattctctgccaagctgctgaaatttgaatatgtatctggctgatttgatggttctggttccaatgagtaatgaacatatctcaagaacaagacaatggctaagactaatatgacatttagtaaaaatcttctcatgtttaactcctttcataagaatggcgcggttcattatatgaggtttagccaataggttttatcttaccattgtatacacaatatcatcagtgaaaaagttcccggtttcaaaaaatcaattgattgtcacggttattagcggttcatttcaaataagagtgaaaaaaggttgagaggaaagacaaaaaaggtaggaacaacctcacttggcaaataaatgtatataggtttaaggagggttttagtaacaggctgcccggttgctgagacggacagctgttaccggcctgcagaatagagattttgcttatttgttctcacaaaatcacaggagaggatagagtccaataaaaatgttctgatctgttgtttcgaaaaacaaaatgctttgattttcgttttgcttttctgtctcacaataatcgttcttttactaatcgttccgtctttcttcatatataatgctgattggcatttggctttccaaagatcggtgcaagtagaaattcatacggttgctctccccttcccagtttgatatgatcacattataatacgaacaaacgttctttttcaatccccaatgatttcctcagcttctgaatctatcgtatctaatgcgaaagattcagaaaaacaaactcttgtctgtctcttacagaggacaaacaaacttaccaaacctatcatctgttcatagagtatacagagaaccttataataggaggaaaatacatgtttgggtactctatggtacaaatggtgagagcaaatgctcacaagctagattggccgttacgggaaaccgtattgcaactttacaagcccttcaaatggactccttgcttcttgcataaatttttcgaaaccaaattgcaaaacagaaaaaaaatgtcagtcattatcgaatttgaggaaggctgtcacgagaccggctttcaaatggctggagaggtgctgcaaaaagaaaaacgcagcaagctaaaaagccgcttcaacaaaatcaactgctgcagcgccgaggttactccttcagcattacattcccttctctctgaatgcagcaatatccgtaaagtgtatttaaaccgcgaagtcaaagcgcttttagacacggcaaccgaagcaagccatgcgaaggaagtcgtcagaaacgggcaaaccctgacaggaaaaggtgttactgtcgctgttgtcgatacaggaatctacccgcatcctgatctagaaggaagaattatcggattcgcggacatggtcaatcaaaaaacagagccgtacgatgataatggtcatggcacacactgtgcaggtgatgtcgcaagcagcggtgcatcctcttccggtcaataccgcggacctgcaccggaagccaatctcatcggcgtaaaggtattaaacaagcagggttcaggaacgttagcagatattatagagggtgttgagtggtgtattcaatacaatgaggacaaccccgatgaaccgattgatattatgagcatgtcgctcgggggcgatgcccttagatatgatcatgaacaggaagatccgttagtcagagcggttgaggaagcgtggagcgcagggattgtcgtctgtgtcgctgccggaaactcaggccctgattcgcagaccattgcaagcccgggcgtgagcgaaaaggtgattacagtaggtgcgcttgacgataacaatactgcaagcagcgatgatgatactgtcgcttccttctcaagccgcggcccgacagtatacgggaaagaaaagcccgatattttagcgccgggtgttaatattatttcccttcgctctccgaattcttatattgataagctccaaaagtcaagccgtgtagggtctcagtactttacaatgtcaggaacctcgatggcaacaccgatttgcgcaggaatcgcagctttaattcttcagcaaaacccggatcttacccctgatgaagtaaaagagcttttgaaaaacggcacggacaaatggaaagatgaagatccgaatatctacggagcgggcgctgtcaacgcagaaaattccgttcccggccaataaacatcatcaaaagccggcaattctctctcagcagaactgccggttttttcgtttgaatattcataatcataaggtaaaataatggaaaatagatgaaggaagtgaagaaagtgccatattatatctgcaatacatgcggtgtgcaacatgcacagactgtagatccgcccaactcgtgtctgatttgcgaggatgaaagacagtatattcatcccgatggacaaacttggacaacccttgaagacatgcgtgagaaaggaaaccttcaaaacatccttaaaaaggaagaagagcatctttacagcatcaaaactgaaccagagtttgcgattggacaaacagcccatcttattcagcataagggcttcaatgtgctgtgggattgcatgacatatcttgaccaaaagacaattgaccaaatcaacgaattaggcggtattcaagccatcgccttgtctcatccacattattactctactcaggttgagtgggctgaagcgtttcaggcgccgatctatatccatgaggatgataaagaatgggtgacaaggccaagcaatcacattcacttctggtcaggggaaacgctcaatatgaagccgggactggacctttaccgactgggcggacattttaaaggcggtgctgttttgcattggagcaagggcaatgaagggaaaggctgtctattgaccggagatatcattacggttgcggcggatcgaaactgggtcagctttatgtacagctacccaaatctcattccccttcccgcctccaaagttgaagaaatagcagccaaagtaaaaccgcttcaattcaaccggctttacaatgctttctctaaagttgtcaaagaaaatgccgacgaatcggtccagcgttctgccgtacgctatatcaaggcactcaacagcgaactgtttcatacataaagagtggggcggctctttcccgtgtaaaagatgcagcaattgggaatagtatcgtgtagatcaaaaggaggaatattgatggcacacacgaatacacagctttctcaatggctggaatcaaaagtcggccagacgcttgatattagaaaaggtgaattgacccatgatgaagagatatcagacttggatcagattgttctccaccttcaaaaagtggctatacgcagtacgaatcatcctgatgattatgttgcgaaagaagagcttgttttagaaggcgaaggaacaacattcactgaggacggaaacgtaccgcttccgcaaaatgcctatgagattcctttattaggtgagcttcatattcaccaagaaaacgaaggattgaaggtcgtaacagatcgtgcagtatatacaattgatatccagcacagctgacagccactttcatcaaaataatacagcgtagcgcctttgagctttcgttcaaaggcgctgctttatatcgagccgttttttcacttttttcgttcttctccctattgaatgacgcctaagatagatatatagttttagagacaggattacatttcaaatcattctgttttttgtaaactaattcagcaatttgattcatctatttaccctattaggcgaggagaatgcaaatggaaaaattgatgtttcatccgcatggtaaagagtttcatcacaatcctttttcagttttaggacgatttagagaggaagagcccattcaccgatttgaattaaaacggttcggagccacatatccggcctggttaattacccgatacgatgattgtatggcctttttaaaagacaatcgaattacaagagacgtaaaaaatgtgatgaaccaagaacaaatcaaaatgctcaacgttagtgaagatatcgattttgtatccgatcatatgctggcaaaagacacacctgaccatacccgcctgagatcacttgttcatcaagcatttactccccgaaccattgaaaatctgcgcggcagcattgaacaaattgctgaacagcttttagatgaaatggaaaaagaaaataaagcggatatcatgaaatccttcgcttcccctttgccttttattgttatatctgaattgatgggaatcccaaaagaagatcggtcacagtttcaaatctggaccaatgcgatggttgatacctctgaaggtaatagagagctgacaaatcaggcccttcgtgaatttaaagattatatcgctaagctgatccatgacagaagaataaagccaaaagacgatttaatcagcaaacttgtgcatgctgaggaaaacggcagcaagttaagcgaaaaagagctctattcgatgctgttcttgctcgttgtagccggccttgaaacaactgttaacttactcggctcaggcaccctcgcattgctgcagcacaagaaggaatgtgagaagctcaagcagcagcctgaaatgatcgctacagcggttgaagaattgctgcgatacacctcacctgtcgttatgatggcaaatcggtgggccatcgaagactttacatataaggggcattcgatcaaaagaggagacatgatttttataggcatcggatctgccaatcgcgacccgaatttttttgagaaccccgaaatattaaatataaatcggtcgcctaatagacatatttcttttggttttggcattcatttctgcttaggagcgcctcttgccaggctggaaggccacattgcatttaaagcacttttgaagagatttcctgatattgaacttgcggttgcacctgatgacattcaatggagaaaaaatgtctttttaagaggattagaaagtctccctgtttcactttcaaaataacattcaaaacgcccccttttaaaagagggggcgtttgtgttttctcagcgcttcaccaattcatctgtttctttttcttccctcgcttcatgtttcttccggaaagccttaaggaaattcgcattcactactcccctgtttgaatagagcttttcgcaaaattctaacagggctgttgacgctttcggttcggttaatatcatgaagtggttgcttgaatcgacatccaccaggtggaaatgaggaatttgccgctcccattcctcccaataggcagcttgatcaaacggttctttttcatttgataaagtgaaataagtgtctaaatcaccaaagaaagacctgcttttgttgcggaaataataacattttaccgtctcaggatcagggagaggcttaacagtgtacgactccaaatcataggcgcgctgtgttttcatcatttgctgagcctgcgcacgtatttgtttatctggtttgtttagccctcgttcttttgccaagtcaatcaactcagacaggaattcttcatcctctaagcttatgtccacctcttcacggctgatgagaacatccgtaaacttttcccgtttcgcaatcgatgccagcatcgtattaattgtttgcagcattgacgttttcatagatgcctcattctcttttgtctcagaacgatatggggagtcaatcatcaccatgcttttgacagcaaggccttggctttgcagctggcgagtgacttcatatgcaatcatcccgcctaaggaatatccgcctacatcataaggaccttcaggctgtatggatcgaatgatctctatataataggaagccatttgttcaattccgtgcaaaggagcagaatcagtcatgaatcctctggcttgaatgccgtaaaaagggcgctggctcttttgtgcaaattgctgatagatttcaactcctcctactccgccatggaaccaaaagacagggcgcccccgcttgccgtcatttaacggtattaattccggaaacgtgcgagcttgatcattttgtaaggatgtatcctcctgtttctttgcgatcaagtccatcatgtcctgaacagtatggcatgcttgaagctccgtcaagacaatgagagggtccacctttgattgcaattgctgtaataactgtatgcaagaaattgaatcaaatccatactgctgcaatggcttatgaaactgcagttcatccggagccatccctagtacatttgctaatatgtgatgatcgctgctgttgttgatacgctcatcctgtgaaacagaaggcgtattctctactgcttgaaagccgttccagcagcttctcttttcaaatggataggttggcaacggtattctgcgggcaccttttccttgataaagcttttcccatgggatttgcaccccttttgtccagcaaaacgcgatcttttcaaggttgttttcagacaacaaagtctcgatcaccatttctcttaatggaccatccagcaaggcttcgagatctgacgagccattttctgcatttccgctaaagacaggtacagaactcttcagcttatcgcctttttctgctaagcaggcttgcaagccgattaccagttcttctttactgcggacgacgagcgccaggcggtcttccatttcctctcggccggtttgaagtgtataagcataatcttgtaatgacagttcttgttgtttattcacatagtcaagctgctgttgagcaattgcttttagcctgtcttgattctttgcagaaagaactacaatgtgggcaccattctcactcatactaaccggtggttttggtaaaggaatatattcttctaaaatgacgtgcgcatttacgcctccaaagctatagctgttgatactcgctctgcgcggaatttttttgcctgcatcgtcacttaaatccctccattgctgattctcggcagtcactcggaaacgggtgccctttaatgacacctggtcattcaaagacgaaaatccggatatgcctggtattgtttgatgcttcatcgccatgctgaccttcataagagcagccatgcctgagacgagttcaccgtgtccgatgctcggctttaagctgctgatataacatggcgcttcctcccgtacttcctgtggaagttccaattcgagctgactgcagcctgactttaacgcctctatttctatcgcgtctgccaatggagaggcgatcccatgcgcttctatataggtcaccgttttgggatcaatttgcgctccttgataagccttcagcattgcatccttcatgccggccggatttggcgcgtgaagtgacattcccctgccgccatgcgatacacctgaacctttaataaccgaataaatatgatcagaatcttcaatggctttttgcaatggtttaatgatgagaactcctgctccttcacttctgacaaagccatttgcatctgcttgaaaggatttggcctgccctttctcactcaaatagcccattgagtcgaagccaataaagccttttggtgaaagcagcaaattcacagccccgacaatggcttgctcacattcgccgtttcgaatggattgtatagctctgtgcaaagccactagagctgaggaacaggcagcttcataatattcacttggcccttttacatcaagtgcataggatatacggtttggaattagggaaggaaccacagctgtatccgtattgccggctgcgacaaatactcctgtcgggcggctggataaaacctgccctgttaagcctgcatcttccatcgccttccatgcatgtatcaagagcagaaactcctgtgggtccatattcgccgcttctttaggcgatatgccaaaaaacaggggatcaaactcacctattccttctataaaaccgccccattgaaggcttgattgcccttccttatcggctgcggcatatttgcgccagtcccagcgttctttcggcacttcagagacacagttctttccttggacaaggttatcccaaaattccgttacgctgtttgctttcggaaactgtcccgacatgccgataatggctatgccgtctgccgcgtgttcgattgttttatccgtgttcgtctcgtatgccggaatctgtttcatttggttttcgatttgagctgggcgttcttcctgctgatgagcttcaccaaacagctgagcaaaagatgcttcatgtttgtccgcaaaaaagtcgattaactcttgaatagtcggatattcaaaaaacagagtcggatttaattcgatctttgtctctgcttccatctcccttgtcagtgcaaccaattgagaagaatcaattccaaaatccatgatatgcgcttttgcaattgacaattttgacggatcggccatgtttactgccagtttatctgttacatagcttctgatacgagctttcagattgctggctttgatggccttattttgatttcctctttgattcgaaatacgaagctgtttaagcgagtagcccgagtagtgcagcactgtttctgacgactcattgatcacatctacatcaaacagcaacatgtcacctgtattcttaaccaatgtaatcaaaagccagcaatccccttttatcgtttgctttgtaaactggatatcattgattccaaacggcaggaagccgcctgtcatgtcaaactgctctaagaaactgaggatagccaagtacgcgctgtttgtcatcaatgggcttacagtgtaatggtgcccgtttgccagcccgctttggggcaggcgaatttttgccagtatagacttgtgatctctgtagagatgagtaattgtcttaaataactctccccattcaggaccgtttccggttttatacatctgatcgatgtgatgaagcttagttaatgaatgcttaacgttctcgatattgacttttttgggctcaaaagaaccgattccgcattgtccgattgcggcaggcttccacaaaccagaggacggctcgcgatacatgatttgcagttctatgacttgatctttttgcagcggctttgcctgaagttcaatggtctcgccttgtttgatgacaattggactgatataacttaatttgctgatacggccgctgttttcctcagggaacaggttaaaaaatgcttcaatggccagactgccatatgtggcaccgacaagcacccgttcattgttgaagacgtgtccttgaacgtaaggctcatcataagtgaattgatcttgaatgaccggctgattgatattgtcttcaacatctgacgatttctcattgatagacgatacatcgaaatgaaatgatgtattatggtcaaatgcatagtgaggcagatgaacccagcctgttcggttccctatatcagcttctttaaaagcaatcaatgccccttgtgcccattgctctgctgcgtttatttctctatccctagatgctgattccgcacatggctgtaaatcgaatgatgtatagatgccttgctggagtgagctttctcttgatgttcggaacacctttagtttttcgatcagctcttgagtcgatgccactgtaaatgcagtcctatgctctaaattatggtttctcctgtgtaaagcctgtacaacgggttcaatatccagagaagcttccttctctaaaaacaattgcatattttctagatagctaagcaggctccattttgttttggctgaaaaaacggcagtgaattcctgctggcggggagcgatatgttctttctcaggggccgtctccatatattcttctataataagattggcataggctccccccgctccgaaggaattgatcatgcttctgcgcggcaattgttttccagtttcaggatcattcaagcgatgccatggctctgtttgttcctgaagatagaaagccgtgtgttccagcttaatatttggattgacaggcatcgcgttaattgtcggcaccagcgtccctttcttcatctgcagcagcacttttgtcagctgagaaataccggaagccgcctctaaatgccccagattggatttgacagagcctatcgcacaaaactgtttcttgtttgtatattgttgaaacgcgtttgttaaggcaattacttcaataggatcgcccagcgccgaaccatttgccgccgattcaatatagccgatagtctctggatcaatgcccgactgctgaatcgacttgacaattaactttgcttgctgcttcgggtccggagctgtatacatctgtcttccgccgctatggttagcaaaactgcttttgatcacagcgtaaatatgatcctgatcttccatcgccttcgaaagtggttttaacaggacagctccgacgccttccccgggaataagcccgtttccggtgccaaaacttttgctttgattgccgcttcccagcagattggcacgctccaaagaatcatatttagagagatcgagtgttaaattgacacctccagcaatcgccattgagcagtttttcaatttcaggctttcacacgcaagatgtatggcgtttaatgaactagagcatgctgagctgacagcgatactcggtccggtcaggttaaaaaagtgggaaacgcgatttgcaatgtgccagtctcccccatttgagctgaggactgcctgctctaaagatgggatattccaaaaatactggttatacatattccctataaaaacacctactccgtcatcatcccgcaatttatccagccgggttcgcgtatagccgccgtcctcaaacgtttcccagacggtttctaaacataaacggagttccggtgtcatttccatcacccggttttgctccacctcaaaaagctgatggtcaaatgcctctatatcttgtaaaaatccgccatagcgtttcttatttgccggcttttttggatcttttgataatgttttcaataaagatgtgcgccatctggattccggtgcctctgtaatacaattgtctccggcgattaaatgcccccaaagctcttctaaactgttagacatcggatagcgcccgcttaccccgattattgcgatatcttctgtactagaatcattaaaatgtgttccttgcaaattacttgtcttttctatttttagtggttcggtatttgctagctgagtttccgtgacttcctgctctgtaacaaagcggcgtgtatgaaaagtaaatggcttattaggatctgtacgctctgtttgaagtggagcttcattttttgcaggcttcgttttttcctttaacaatgctgtccgaagcttattttcatgcccctttactaaatattcgacgagttcttttgtgttgttatgttcaaataaaatggtttttggaagctctcccgtcactttttctaattcacgaatgaaattcacctgcaaaatcgaatcaattccatacttctcaaatgtcgtatcttcgtgaatacgttctggtgatagtttgattgattttgccagcgtatgcttcacaaattgtgccgtttgttcgatgagagaatcgctttcctgtgaatgatcgatttcagcattcatttgtatatggcttggatcttcttctgcctccgttctcttcttttgacggacgactccgttactttcagcggcaatgatctgctggccgagttgatgcgattgttcagccataaaggaaacatagcgaaatccttcactctcaagcaccattttccaagtgtctggatacaggcccgggcagcccggtatgcggagatcaggatcctcatacagccaccagccctctaaaaggccgaacgtcaaatgcgaatatatattatgattacttatttcatttaaaaggagcagcccgttttttttcaaaactgcttttgcatttcgcaatgtctgccggatattttttgtggcatgaagcacatttgccgcgatgaccgcgtcgtagcctcccgcatcaatatgctgttcagacgccggctcctcgacattaaatcgtttatatgtcaaatatggattgtcaggaccatacttattttctgcatgcattaaaaaagctttagacagatctgtataacaatattcttttatatgtgtctgccatgctttcaatttttgaaaaacagccgcgcttgtcccgccggtcccggctccgatttctaatattcgaatcttcgcctcaggctcttgcttcagacgttcttgcagataggctgttaacgtatctgcaagaacatcattaaaatagtctgcgacttgattgtttttatagaccccttctactaaatccatagatgaattcggaaacaggatatcggtggctgacgccttgccggtcagaatctccggcaaggctttaagtgctgtctccaccaatgtcaccatggctttcatattattgtcttgaagcaggtcaaatttttgttcattccattctttccacagctcgctcatggtgcctattgagcgtgttggaacatgtccgttctccgttcgcttgagaaattgatgccgttctaaaatcgattggctttcttcaaaccatctgccatagaaattctccaataccggctgggatttactttctgtgaaaaaccctatggactgtaattgtgcgaaaagcattttacagagaatgtcttctgtgttcagcattggcgtttcccctcctataacagttgttgaatctttgtgttgtcacccgggtgatagcttcgcagcttttgaatggcggagccgtgagtttccgggtacacttcaatcgtttcttctgtctgttccgcttcatcattcgtttcgtttgccattttcatcattactagctgcttcagcggtcccccgagcagcaattccaaagcttccattgcttcaggggcttcaattgagcctatgcctgcctgagccattctcttttggtaatccggtgatgaaacaacaccaatgcttccccaataactccaattcatcacggctactgtacaaggccatacttgagaaagccgctgtgcaaaagcatccttaaaactgcaacccgcagcgtaattgctttgtccggaagctcttgcaaacgattgtacggaagagaaaaacaaaacaaaatccagtggttcatgccggaaaacttgagccattcgcacgcttacatcaacctttgcagcaagaacgtttctgaaacattcctcactcatattcatcaggcttcggtcttgtaagacaattgcagaatggatgatgccgttgatttcacgatgtgtttgtttcattgtttcatacgcgcgttctaattcctctcggttagccgcatctgcttgaatgtaatacggggctcgccctagacgtgcaaatctgtccagcttgctttgaatggctgcatcctttttccttctgccaatccaaacgatctgcgcctgatatgttctgatcatatattcactccacgcctcaccaataccgccagctccgcctatgacaacataaacacctccgtgcttatacttcgtgtgcaccggttgattgttgtgtactggaattagacgaagcttatgccaaatcttgtttcgataggcccacgtattcccttcttgatcggcaggcaaggaaaggagttgagataacggcaggtcttcgtattttttaacatcgatcagctttgtctgccaatttggatattcttttgacattgaaccgatcaggccgtgcaccccggcatcgaccgggtcgacaatatcatgctgatcaacatattgtgtgttcaccgtcacgatcgtccagcttatctccttctgtccatagcctaaagaaagcattgccttaatgagcctatacatttgaatgacgccttgatcttgggcttcaatcatttcatcgccgacttcgcactctgtcacacgagaaggagacatccacacgatgtggtcaaacgatccgagtgcttcaagctggcctgtaattctatgaattgatgcgttcggctcaatgtacagctccttggcaaacggaaactccctttgaacagcttttctgctgttgtcatcccctccgaggatgacaacacgctcatcagcaggcgaaatgctcctcttctccagctgcactcgatcccatatcggcgccataagaagcgctccgttaagagttgctttggagtttcctagtgatgtcggcccgtctggcggttgtatgccttcttccagcagccttgaggtaatccccttgattcttacacacactcggccttgttcatcacacaaatcaatatccagtctctgtattttgtcctcattaggacgagatgtcacagacacccacattttatttgtacacgggctgaatatttctagctcttgcagcgcaaaaggcagagaaagctgctcgtcaccggaattcagctttagcccgatcgacgcttgtaaagcagagtcggccatacttggatgaagaacgaattcattcagtgtgtgagttacaccagcaggcagagaaagctctgccaaggcttgattgcggccgatgtaaagccgatctatcccttgaaaaccaggtccgtagtcaatgccgatcgccttaaacaattcataacactggtcgtgtgagagtgtgcttaaactgcattggtcttgaagcgcgctgatatcctggactggaatgtctcctgccccacggattgaagcactgccttgacaatgtatctttcgatcattgtgtgcagcctctgtatagacgttaaaagcaatctcgccgtcctgctggggatttagactgatatccacttgaacaggctggccatccgccacaatcggctgcacccacacaacatttttgatgtgaataacagattgttgatcttcggttcttctcactgctcttgtaacggcagcatgaaccatctcaagatatgccacgcccggcataaccggttttcccttcaccttatgatcggcgaaaaagaactcagcacctgtaaaggccgagctgaaacgctgctctgacaaatcagatgtgttgacatgtatcaatggatgcaaagctgctgattcgactgtttttaaagctgtttgatgggcggctgcctcctctttcgtatccgttatccagtagcgttctttcgcaaatggataggtagggaggctgatgcgtttcggctgtttgccgtcatacagtttactccagcctatttccatgccttttacccataaatcaagcagtctttcatatatgtgaggctcccagctattgttgagcgttttctgtacttcgtcatctgatctcaatgtttgtgcgatacctttttctgctctgcctctgtacatgtacttcgcattggtgcccccttctataaagaggttcagtttttccagcaagtccccagtcgagacagcgatgatccctaatctctcctccattgcatcacgcccctcttggagtgtataagcaatatcagtgaggtcacgagcagtgatagatcgcttgctgataaagtctgctaattgccgggcttggtctttcagacgatcttcatcctttgccgacaaaataaagatgcccgggtgctgtgctgtcacggctggtgctgttgcaggatgggttgtttctttcggaatatattcctcaatgaccacgtgggcattgacgccgcctatcccgaacgaactgatacctgcgcggcgcggcagctctcggccggcttcatcccgaagcgcctgccactctctcgattcctgcacaatataaaacgggctgtcatccagtctgatatacggattaacagtttcactgtacagacttttgacaagcgttttatgcttgagctgcaataacactttaatgacaccagccacaccggccgccagtgataagtgaccgatgtttgttttcgctgacccaagtccgcaatggctgccatgaacagccgggtcccccgttttttcatacagctctttaaatgccgcttttaagccgttgatttctactggatcgcccagctctgttccagtcccatgcgcttcaatataagttacggttcttggatcaattcccgctttttcatatgctgtttttacgacatccgcctgagctttcggattaggagtcgttagagaatttgcgcggccaccgtggtttaccgcacttcctttaatgacaccgtaaatatgatcaccgtctcgttcagccgctgtcagctttttcagaaagagaatgccggcaccttcactgactgcgaatccatcggctttgtcagaaaatgttttgcatcttccttctttgctcagcgccccggctttatcataggcgatatggccttgcggagttacgaccgtgttgacccctcccgcaatcgccatttcacagtttccattttcaatggcgcaaaccgcatgatgaatggcgaccaaagagcttgagcacgcagtgtcgatcggttcactcggcccatgaatgttcaggaaataactgactctattcggtcctgcagaaggactcatattcgcagccgctgagccttcgatgtctacatttgacagaagtgaactgtaccctgtgtttcctgtcccgatgaagatgcccgttttggttcctgccaggcttctcgctgagtgtcccgcttcttctaccgccttccacgcataggtcattaacaggcgctgctgaggctccatctgctcagcctccagcggagatatgccgaagaacaatggatcaaagtcagcaacttcatcaataaaaccgccccatttgacgtttgttttattcgcttctttcagagggtctccgtaatactcctgccaatcccagcggtcttttggaacctctgtaatacaatctgcgcccgatgacaggttcttccaatattcctcaacgtcttttgcctttgggaaaacgccgctcatccccacaatcgcaataggctcaggcttgtgatcagcttccttttgcattggtgttaccgaaggttttacaaagcggttttcagtcgaaaacgtcatattttttatattctgttcgacaggctgcatcagcacctcagctttggcaggcgtttgagctgtaaaagcatttggatattcttctgacagataccctgcaaatgcataaacagttgcgtgctcaaagaagaccgtaggcgtaagatccagcttgcacttctcattcagtgtatttgcgaattcagttaacgtaatcgaatcaaatccatattgattaaactccatgtccgggtcaatctcttcaggtttgattttgagcaattgagagattgtttgctttaaaacttcttgaatgtggtcaaacatattcccttgatccattcttgcttcagatgtcacccgtacttgcactgttttcattggtacatcatcagaagacggcttttgagtcagcttttccctcatcatgtctttgaatccttccatgacgatgacttgatctttgccaaatgccaaacctttatacagcgcttgaatgccggtctcggtccgcattggagtcacacctgtgtttttcaacgtcatgttttcaatttctttattcgcgcgcatgccgccttctttccagagcggccaattgattgacaacgtttgtccgtgcctgtacatggcggttacaagcgcattccgataagcagcataactgtccataaatgcattagccattgcataatcggcctgtcccgcgctgccggcaacacttgatattgaagaaaagaggataaagaaatctaacgcaagatgctcggttgcctcatccacattcacaagccctttcaccttaggagcgagaacttgtgtcagctcttcattggttttgctcataagatagttatctttaatcagcccagcgctgtgaatgacaccattcaagtcttcgtaatcagacgtaatgcttgtgataagctcggaggctgcttccgtttgtgtcacgtcaacctgcctgtattctgcgcgagcccctaattgctgaagttcgttaagctccgcctgctgatccgcattcaacgcggatctgcctgtcagaatgagcacaggctgttcggcttggcgagcaatctcttttgcaaaaataaacccaagtcctcctgcgccgcccgtgatgaggtatacacctttatctctccacggcatgcttatttcccgatcatctatttgcatttcatccagatcattgatgtaccgtttgcctttttcatatttgatgtgctgatcttctgtgtgccttttattctctttcagtttttctattacactttcaacattttcatgtgaatcgatttcaatcgtctggccgattagttttttattctccaggccggcggttttaaggagcgccgatagccctgagaatgagtactgctttctttgtgcagaggtaagcagctggatcagaacattgccctgaggtctgcttttgagaagaccctggaccgtctcaagcgcttgttcggcataatcttggaacctctctgcaagtccttcgcggaatgactccaaaacgatgcattccgctcctgtcattcttgattcaatgcgatcttttgagaggccattcatgtcgcaaagcatgacaatgtgccgttcgtaatgaggctcaggactttcttttttaaaatccttgggcacccatttttcttcaaacatcagggttgccagcgtttgatcagattccgccgatccagagccgccttctgctgctctgaaagataatcctttcatccgtacgcaaacattgccgctctcatctaaaatatccatatcgcgcttttgcaccttatcagttgccttgctgccttggctgtatcttgcgtatacccacatttctgacgaacatgctccgaagacttcaagctcctggaccgcaaaaggcagtgtcagctggttatccccggctcctgtcaaaatgcttgacgcctgcaaagcagaatccatcagcccagggtgcattttgtattggctgagcgtatctgcagctgacggatgcaatgacaattttgccaaaacaaattgttcagctgtatagatttttttcactccgcgataagcaggaccatattcaaatccaatcattcgataggtgtcgtatacttcgtttacgctgaaatgactttcctgacactgctcccgcagagattgcaaatcaaccgccggcaaattttcagcaggattcaataccgcgctgccttgactgtagacgattgactgttcgccagtaacgtctgaatgaccatagatttcataagagatctcaccattttctcccggtaaaagcctaatgtgtacttgctgcggctgatcctctacaacaataggccgcacccacaccgcattctttagcttcatgatgcgcggtacaccttgtacctctgcggcctgctcaacagctgcccgcgccaattcaagatgagccactcccggcaaaatccgttggcctttcacaacatgatcagcaaggaaaaactcttctcccgtataaatagagctaaacctttgttccgagagattggatgtgttttgatgcattaatggatgcagcacggctccgccaaggcgggaggctgcttgatttgcatcaatgctgccgcttttttcaatatgatcagagatccaataacggtcttttgcgaaaggatacgtcggcaagctgatgcgctttggcagattctcgccatacaatttcgtccagtctacatcaagcccttttacccataattcaagcaattttgcatactttccccgttccatccatttctcgacggcttcttgaatctcttcgtcctctgtcagcatttggagtgtgcctttatcaatcctgcctttaaatacatcctccacaccgcttttctccgctgcaaagtcttttaactttttctgtaaatcctcaatggaaccggaaataatcccgagacgttcttccatcgcatcccgtccggcttgcagtgtataagcgattcgggcgagatttacgtcactatatgtttgcttatcaagcgcatctgccagctgctgtgcatgttcttttagccgcgcttcatttttagccgataaaacgaagatacccggatgttccggcgcgatggatggtatattctcatcggatgcttccggaatatattcctcgataatcacgtgggcgtttactccgccgattccaaatgaactgacacctgcccgtcgaggaagctcttctccctgttcatttttcagcgctttccattcttccgtttcccgtacgatatagaacggactgtttttcagctgaatgtatggattcacgttttcgcaatgcagacttttcactaaggttttatgcttaagctgcaataatattttaataactcctgctgcaccggctgccagcgataagtggccgatgtttgtctttacagaccctaatccgcagtaaggattggctgatgtgtctccttcatttacacccaatgctttaaaagctgatttcaaaccgttaatttcaaccgggtctccaagctccgttccggttccgtgggcttcaatgtaggtcacggttttcgggtcgattcccgctttttgatatgccgactgaataacatctgcctgcgccttcggattgggagtcgttaaagaggctgcacggccgccgtgattgattgcactgccttttatgactccgtaaatatggtctcccgcttcttcagccgcttttaattttttcaggaacagtatgccggcaccttccccatgtgcaaaaccatcggcttgatttgaaaacgtcttgcattttccttctttgctcagtgctcccgccttatcaaagctgatatacacctcaggaaggataatcgtatttacaccgccggctaatgccatgtcacaagtgccttcctcaattgaagagatggcatggtggatcgccactagtgaacttgagcacgctgtatcaaccggttcgctcggcccatgcagattaaggaaataactgacccggttcggaccgaccgatgggctcgtattggctgccgctgatccttctattgccgagttcgctttagatagaagagagctgtatcctgtatttcccgttccgatgaagacgccggtttttgtgcctgacaaccttttcgccgaatatcctgcatcttcgatcgctttccaggcgtaagtcagcagtaagcgctgctgaggttccatttgttcagcttcacgcggggaaatgccaaagaataatggatcaaaatctgcaataccgtcaataaaaccgccccatttcacgttcgttttattgacttccttcgccggatcaccttcatattcacgccaatcccagcgatctttcgggatttccgtcatgcagtctttgccctcttttaagatgttccagtacgcctcaacgtctttcgccatagggaaaatcccgcttatgcccacaatggcaattggctcaggcccagcatcactctgtatggcgtttggcagcatgacttgctgctttctgcgtcttttagctttggcacgcacggcttgttcctgtttcgcagcaggctgaagctgagccgatacagcgcgcacagcaaatgtcttcgcaaataccgattgatattcttctgacaaatgcttgccaaacgcatgaatcgtcgggtggtcaaaaaatacggttggcgtcagctctaactgataggcgcgattgatatggttggtgaattcagtcatggagatagaatcaaaaccatacaccgtcatctctgcatgatcgtcaatcgtttcaagcttgacctttaacagcttggcgatctctcgctttaacatcgcctttactttatccagcaaactgtctgcatcaatgctatttatttgttcagtcatgtgttctgcttccttcttttccataggtgctgaggcgtttttggccagcatgttttgttttattttctgcacatcgccttcgatcaccattacttggtttgcctctgaatgaagtgcttgatataatgcctgaattcctttttccgccctcataggaacaataccggcaagttgcacaagccttttctcagtttcttgatcgacctgcatgcctccatctctccataaaggccagtttacagaaagcgtctgcccatgccgctggctgaggtcggcaagcctatttcgatagcctgcatacatatccataaatacattggctgccgcatagtcagactgaccaatgctccctaaacttcctgaaagagatgaaaagagaataaagaagtctaaaggcaaatccttactcgcttcgtctagataaacaagcccttttactttaggcgccagtacatcgtgcagatcttttgcctgtttattaaccaggtagctgtccttgatgattccggcactatgaagaataccgttcagacggccatatcttttttgaatgtcgtcaatgagctgatagacttcaattttattggtaacatctgtttgccggtaggtgatgtcagcccccttgctatgaagctctttcagctttttgcttttgctttcgctaagaggtgagcggcccgccagaatgactgtcgcatttttcgtttgttccgcaatttcctttgcaaaaatatgacctagtccgccggcacctcctgaaatgagataaacgccattgtctttccacggtttgctgccgtctccttttgcctgtttgatttcacgccaatcagcaatataccgtgtcccgttttgatatttgacatatgaatcgctgctcatttgattttctaacagtttgccagcaatgctttctccactttcttcactgctgacttcaatcatttggccggttagtttggcattttcctgacaagctgttttcagcagtcctgtcaaccctgaaaacaattgctgttctccctcggcagaggtcacgatctgaacgagaatgccgtctttcggtttcgtacgaatgatctcttgtacctttttaaacacttgttctgtataagaatggaaacgcccatctactgaagaaggccttgcttccaggctgtatacatggacatcctcgatggctgcttcaatttgttttctcgtctcatgatcatattcacataggaatacgagatgctctgcatatttttttgcagctaagctgttagcagccttttgttcttgccaaacgggctgaagcaataaagtttcagcgttgatttttgatggttcggtttgtatatctgcctccatcactctcgtcgaaaatcctttcagccgcacacagatcatgccatgctcatcacataggtgaatatcgactttctgtatcaaatctcctggtttgtttttcgagttgaattgaacataaacccacatgtcagaaacgcactgacgaaaaacctcaagttcctccagtgcaaatggcagtgctgccttaaagtcttcagtgtctgaaagttccgctctgacgacattttgcaaatattcagccgcctgtaacgccccgtccattacacttggatgaagaacataatcgcccaacgtatgtgcaacagattctggcagtgataatttggcaagcagctggccgtcgcctttatatacggcctctacactcttgtaacctggaccgtaatcggcgccgatcatcccttcataaaacgaggcagcatccattttgctttgatcacattgtttcttgatcttagaaagatccagtgctttttctcgctttaactgaatcaattccgctttaccttggttatatacaactggttctgcatcagcggattccggatcaccatacatccgataagcaatatgtccgccatcttcatcgtaaagtccgatatttacctgaaccggctcacttcctgctacaaccgggcgaacccacacgacatttttcagcctgattccagtttcatgatcctccaatccgccaattccttgttctatagcggctcttgccatttcaagcgtgaccgccgccggcaaaatcgccatgcctttaatgatatgctcggcaataaaatactcttgtcctgtgaaaatggagctgaaacgctgctctgacagaaccgatgtattatggtgcaccaaaggatgcaaacgagatggttcaattgttgtgatagcgccggtgctgctttcaggccagtatcgttcttcggcaaaagggtatgtcggcaagctgatgcggcgtggctttatatttggatagagcctgcgccattcaacgtgaaagccatttgcccacatctcggcaagctttctcaattcttcttttgatatccgcgatgaagccatatcatctgcttcagcatttccaagcagctgttcagcggatgtcattctcgttttttctccttgaatacagccttctgcgagcggctttccagtcacaaaagcttccagctgatgtttccactcttccagatcgttcactataaaaacgatcctgttatccattgcttcacggccgacttggaaggtatatgcaatatctcttaaagagaaatgcctttgctcgtcttgactgatataggacagcatttccttcgcgtatacttggagccgttcactattttttgctgatataggaatgatgtaaggctgattgccttcgttttcggcacctgcatcagaaatgttttcatattgctcaaatattgcatgggcgttagttccgccaaggccgaatgagctcagagccgcccgatggacacctgcgtgtttctctaacgattttcgttcacggacaacataaaaaggagagctttcaaactttatatccggattcggctccgtacagttgatggtcggtgcaagttcattatggtataaactcatcgcaactttaatacatccggctaaccccgcagctgtatccaaatggccgatattcgttttcactgaaccaattccgcaaaattgtgttttgtcggtgtattgcttgtacactttatttagagcagacatttcaataggatcgcctaatttcgttcccgtcccgtgcgcttcaatataactgaccgtttcaggatggatcttggttgtatccaatacatgctgtatcacttctgtttggccttttacacttggcgcatagaagcctgccttctctgccccatcattattgatgcctattccgcgcataatggcataaatatggtctccgtcttttacggcatccacagcttttttcagcaggatgactgctacgccttcacctccggccattccgtccgccgaagcatcgaacgccttcacatgcccgtcgcttgaaaaattcaacccgttttggtgcacgtagccgatcgctgattgtgcgtgcaatgttgcgcctccgacaagcgcatattgtgattcgcccgatgtcaggcttttgtatgcttgatataaaccgactagtgatgaagaacagttagaatgaacaaaatagcttggcccttttaatccgagcttatgtgagatcattgtgggaatggttccgctttgggctaaaacccaagagacatagccatccggtgattcatgtccttctgttgtctccttcggcaataacgttctatatgaattgctgcttgcagacatatatacacttgttgccggaatctccttagccacatatcctgcatcttcaatcgctttccaggagtgcagcaataagaggcgaagctgagggtccatatactcagcatcttttggcgagatttgaaagaaaccgggatcgaataagtctttcccttcgatcacagattgcacaggcacatagtcaggatgctgtatcaattcttcgggaactccatttgcgcgaagctcttcttcagaaaagaatcgtatgctttctttgccttctttgatgtggttccagaagtcatgatgatttttcgcacccgggaactggcaagatatccccacaatcgcaacactgtcgtcaaaataagggggaatcttctgtttcgggtattttccatcttttttgtcatcatgatcatcttcattttgtgtcccggctagatctgagtttttcatctccaaaatgtattcactgattgcacggatcgtggaatactcaaacagctcagtaacatgaaactcacaatcgaattcttttttgattcgttcagccacagctacagccagaagcgaatcgccgcccgcatcgaaaaatccgtcttccggcccaaatccgctgaccttgagcgtttcctcccaaatgcgcagcacctgatcctctatttccgttaattgcaagtgatttggtttccttctgttgaacacgatctcgcgtttttctaattctttacggttcacttttccgctgggcgataatggaagctcatctaagcggataaagtgtgaaggtatcatatattcgggcagactcgattttagatgaaggcgcaaatcttttggattggcagaggcatgtccgctttcctctgtataataagcagcgagctgttgatggccctcaagctgcttcaccactaccgcctgatctaaaatgcccggaaattcacccagctttgtttctattgcgcccagctcgacgcgaaaaccgcgtattttgacttggctgtcaatccgtcccaagtattctatgttgccgtcaggaagccaccttgctgaatcacccgatttatatagcttcgtccctgattcaaagggattatcaataaatttttcagccgtaagccccggctttttaaagtagcctcttgctaagccggctccagcgatgcaaagctcacctggctttccgatcgggacaggcttcaaatgctggtccacaatataaattttcgtgttggaaacaggctttccaatcggtgtatggtgacttgcgatatctccttttccgcatccgaaatacgcagcgtaaatggaggcttccgtcggtccgtatatattttcaacacggcagtttgtaaagagcgataccgcctttttcactaatactttagggaaggcttcacctgcaaccatcatatacttcagcggaccgtcctctgtgaatcgcttgttgtctttcgccatttctaaaaaaacatgcagcatggccggcacaaaattaatgtgagtcactttatatgtttcaatataatccatgcaaagctgcggtgatttctccccattaggcggaagaatcactagacggccatctccaataaaccatccgaataattctgagatcgatacatcaaacacatagttcgtcttcaataaatatgcatcctcagccgttacaggatagtgagattcaagaaaattcagggtattcataatgctccgatgctctaccataacccctttaggctctccggtgcttcccgatgtataaataatataagcgaggtgttccggttttacttcccgctttaaaccgctgctttgctggtctgtataaccgtttcggcaagctaactcgatattgatcgcttttacatggctgccagttaatccgctgatcctatcatgaacgttaggttgggtgaggacaatggatgcctgactgtctttgagcatgtactttaatcgttcttgcggaaaacttggatctaacggcacatacgctccgccagctttcagtattcctaaaattccgatgatcatatcaaacgaacgctctgcacaaatgccaacgggctgttcaggtctaacaccctgatgttgaaggtagactgccacagatgtgcttttttcatctacttctttatatgtaagtgatctgtcttcaaacatcacagcaaccgcatcgggggtttgtttcgctttttcctcaaacacctcatgtatacacttgtcatttgcgatgtttgtccctgtcgcattccattgttccagcaaactagtttgttcttgatttaattgcaaagagtaggcttcaagcggcaaagacgggtcctccatcatgtgctgcgcgagcttcatatagttctccatcatgctttcaatggaggacagttcgtacaaatcagggttgtacagaagatgaagcactgtttcattttcttgctcatatatttcgagcgccagctcaaattcaccctcttgccgaatgtcttcaatatattcgatgccaagcgtttgatacggttcaagcactttttgcaagcctgttgcctgaaaaaagttttggtacagaaaagctgtttgaaaaaccggagaatccgcggccgagcggtctacattcagctctcttaccaatgcagggaacggaaacgccgcatgatccaggccgacagccactgtcagctgcagttcccgaataaatgctgttaatggctgagatccgatattcttgctccgaacagccatcatattgataaaataaccgattagggtttcaaatctgtcttcttgccgacccattgtcggaacgccaacaatgatatccttttgttttgtataatgatgcagcagcactttgtaaatggagagaaacacaaccgattcattcacatgattggtgcgggcaaacgatttaatttgatttctcaggtgatgagggagcaagcttttataagcttgccccttaaattttcgtgctgaagaccgcggacggtcagcaggcaaatcaagaactggcagactcccagacaactgttctttccagtaagcgagatgctcttccccttctctgccagtcagcattcgattttcccaatcgacaaaatcgtaataatcagctgttgatggctgctgcaagggttcaatcccattcagcaattgttgatacgcttcgaatagcgccgatatcaatgtcagcatcgacacaccatcaaatatgatatggtgaattgttataagaacaatgcattcttctaaccgatgaaaaaggtgtgtgcgccataacggaccagcttccaactggaaaggttcttttgctttttcttttagaaaaggcataatatctgctgatttcattgctgatatatcctcttccacaaaataaagatcctttgataactgaaccgattgaaatggaatgccattttcttcttgaatcacactggctaagaccggatattgtctctgtacaaacagaagggctttcttgaacgtctctgcatgtattggtttgctgaagcgaaagcataaaggaatgttatatgcactcatcccaggagacattttttgaagcatccacagccctttttgcccttctgaaagcgggcttttcaactgccgcttcatgcctttaagatgttcttccacctcagaaatggttaattctcctgatctgaaggcatcgagaatttctttatgattcatacgatttactcccttctatgatgttttgcacactcttaaaatccaatttccctagcgccacctcttgcatcaatccaatgatttgctcgtctgtatacgtgccctttatgtgatgtgctgctgcgctatgattttgtttttccgcttttaaggccaaatggtcagatagagcttggactgtctgacattcaaggatttcccggccggccatcttcagctgcgtggttttttcgatatgccgcatcaattttcggccaagaattgaatccatcccataatccaggaagtttcttttgaaattgattcgatcctcagatatgcccaattctcgtgctaaaaattgaacaatgatcttttgaatatgggttttgccattcggctcgtcaatctctgttttcatatcttgtgaatgctgtttaacggcctctgattgctgagtgcctgacgaaatccaataccgttcccttgcaaatggataaccaggtaaagaaaccatccgaacgtcatcgccatcatgaaggagttcccaaggaatctgatatcctttcacccagcattccgcgatgttttccaaatttctttcttttgcgagagcttgcagaactgcttcatcttgttcttctaaaatcccttctgtatatcctgtataaagggatctctgttggcctgataccccaccattcttcattgcttccacatattccttcaattttcgcaccaattgctcctgattgtttgcaacgatcgcgagccttgcttccatggcttttctcccaacctgaagcgtatatgccacatcaggtaaagaaaggttatgattctgctccagatacgcaatcatgcggcaggcagcatcctgaagccgatcgtcattttgggctgaaatcacaaagatctgcggtgacccttgatgccgctgtgtggacggctgatcatccggaatgtattcttcaatgactgcatgtgcattggtgccgctgattccagtcgtgctgatcgttcccatcctcggcttctgatttttcttgatccacgaacggttttctttgcaaagcacaaatgggctttctttaaacggaatatacgggttttccgattcacagtgatgagtggccggaatgatctggtttttcatagccatcagcatactgattaaagcaaccgttcctgacgctgcaaatgtatgtccgattaaaggtttaattgagctgatcatacagaattgcttctgcttcgtatatttgctgaacacgctcgttaacgcttggacctcaagcggatcaccaagattcgagccggtactgtgcgccatcacatattgaatatcgagcggattgatttcatttttttcataaatgttttcgatcaattctgcctggctaaaaggatttggcgcagtaatgccgttggttttgccatcgtaattcacgccgctggccttgatgcagccataaatatgatctttatcttcaattgcctttgataatggtttcaagagaacagcagccaccgcttcacctggcacaagaccattggcatcctggtcaaacactttgcattgtccgttcggagacagcatttcggcccttgtcagcgcctcaaaagacatgtgagaaatattcaagctgacgccgcccgctaaagccatttcacaatccccctgacgcagagctgaacatgcctggtgaatcgccaccagtccagatgaacatgctgctgtcaaagccatattaggcccttttaaatccaatgcgtatgcgattctcgcagacaatgtggcgttttgtgttccgttaatgtaatccgtatctccggttagatgcgcatattccccttcttccacacctacataaacaccgcaggattttccttttatccgatctcccatatagccggcgtcttcaaacgtgtgccatgcttcctctagaaaaatgcgctgacgcgggtccatgctttcggcttctttaggcgatatttgaaaaaacagcggatcaaaccggtctatgtccttcaaaaatgcaccccaccttggcactgctttttctggatctctgttagctctcccccagtcccggcgttcgcccggaatgtcagagatacacgatttaccgtttttcagattatcccacagctcatggaccgaatcagcttgagggaacctgccgctcatgccgataatggcaataggctcatcgtgaacctgccgaatgctttttttactggcttctggttctaaagctacaggaattactgcataagcttcagggggcttttgcgcctctgatgcatcatcccggtaaaatgcttcaatcagctctttatgatcggttaagaaaaagctgatcaattcttgtaaagttgaatagccgaaaaataaagccggtgtcacttcgatgttgaaatgctttgataacacgttcgagaatttagccaaatagatcgaatcaaatccgaagtcggcccaatttttgttcaaattcagcttgtcctttgaaatcttaagcaatgtgtgaatatgctctttcaagtcgtgttctaaacgcttttcaatgcttagtgtttttacctcatccttgttttcttgtgctagaggggcttgagtggccggttctggaatagctggttcagtcattcctaaaaatctgctgacacggctgggctgaccggctatcacgagatgctgagcatcctgctgagctaggatgtgctcaaacatacggataccttcctcggcttctaggaagcgttggccgcttgatttcaggtacatatccgttgtttcctcatcaccgatcttcattccgccatccttccacacaggccagttgatgacaaacgttttaccgttatgcagctcatttctgtattgtgcgtaagccatctgaaacctattgccaatcgcataatcacaacatccaaaatcccctaaaaccgcagaagaagaagaaaaataacacataaaatcaaggtcttcatttttaagccattcatcaagcgctatcgtgccgttgattttcggttcaatgatgcgctggaagctttcgatctttttgtcaaaaatagcagagtcgctctcgattccggctgcatgaataacaccgttgatggcaccgaatcggtctttccctctttttacgcagtctcccattgcgataggatcagacacatctgcttctgcatacatcgcttcgccgcctagatcctttaattcttttatttgcttttgcttctcatcattaaaaggcgacctccctgtcaaaatcaggtttgcggcatagtttttggccaaatgcttggcaaataaataaccaagccctcctacaccgcctgtaatcaggtaagtaccgccagacttcaatttgctgttgtccggttgtatcgttgtctgttcaatgtgatttacatatcgtttcagattctgatacaaaaccgtttgttcagttgaagcctgtaattctgcccagactttacgtgtccaatcatccatcgatccttgttccgcgggctgaaagattccagtcacttttgtgtgcggaaggacaagcccgagtgaacgttcgaagccaatccatgattccagataacttcggtcaagactatcttcaaaacatcctgccagcagcagccgtgaaggatgaagctttgctgcggacataccttgtaataggtaaacaatacaggaatggtcctttatacagcgcttgtcttccataggccacatatagaggattgcatctggctctccaagttcttctttaatgctctggaaggccttttcaaaagtaacgggttcttgccgcacaatctggtagctatattcagactgtttgctgtacacttcgccctgtgatataaaaatgaccttggtgtcttgatcaacgtttttcagggctgaagcaaatgcgttttgcttttctctttcagtcagaaaacagatgagcgttttgatacgtttcgatgtgagagtcgccggctcttctttccacacttcttgaaacgtcataaccttgaaaggttcttctgtttgctgatcatgatcctgttctatagacaccggggcctttgccgcgcctggtgcccagtaacgttcttttgcaaatggatatgccggaagactgatccggacaggcgtttgggtgccgtacagcatgccccagtcgaaagacaagcctttcacccaaagatccagcagtttcgtgtatttccctttgctcatccatgcttctatgattttttccgtatcctcatccgctgataagactgctaacgcttttttgttatcatcgatgcgatccagatacaggctgtctgctttgttttcgataaaatcgttcagctttctctcaagatcctctagtgattccgctataaaggccagccgttcctccattgcttcacggcctgtttgcaaggtataggcgatcctgatcaggtctgtttcgcagtaccttttttgtttgatggctgtaagcagctgttccgctttttcttgcaaacgttccatgtttttggccgacagcacaatcagcgctggaggatggtctttcggcgtttgcgcccccgttcttggaatatattcttccaggatgatatgggcattggaccctccggcgccaaaactgctcaagccagcgcgcctaggcacctcttgcccgccaatcaccgggcgtttccattcaccaagttgctgctgaacgacaaatggcgtatggctgaactcgatgttcggattcaaccgctgagcatgcaatgatggcgcaatttggccatatttaaactgaaaaagtatttttgtcagccctgcaattccggctgcactttcacaatggccgatatttgatttgctggagccgatcgcacaaaactgtttctcctgcgtatctttctcgaatgcttttgttaaccccgctatctcaatcggatctcctaatgcagtgcctgttccatgcgcctctaaataactgatggttcgggcaggaatgtcggcgcgctcaattgcttctttaatcacctgtgcctgtgcatgaggatttggaaccgtgtatccatttgtttttcctccgctattaatggcacttgcctttatcacaccgtaaatatggtcaccgtccgctattgcttgctgcagcggctttaacacaatggcgcctacgccttcaccgtcgacaaatccatctgcatcatcgccgaatgatttacatgtatcactagcagagagcatattcatgacagataaattctgatagtgaaccgggtcgacaactaaattgacaccgccggcaatggcacaatcactcgatccgctatagatgctttccagcgctaaatgaatcgctgtcagggaggatgagcaggctgtatcgactgcaagactcgggccttggaaattcagtaaataggatattctgttggcgatagaccaatagccgtagccagtcggataatttttgttcatgactccggcaaagacgccgatttttctgcttgaacagagcgagtcaggcgtgtatcccgcgtcttcaatacttgcataagcggtttgcagaaataatcgctcctgagggtccattctttctgcctcaagcggagaaatctgaaagaataatgggtcaaacttgtccatatccttgataaatccgccccatttcgtataaattgatccttcttttcctttttctttatcgtaataagctttccaatcccagcgatctttcggaatttcctcaatacaatttcttccttcttttaggttgttccaaaagtcttctgctgtttccgcctgaggatagcgtccagaaatgccgataacggcaacgtcacggcttgcaagagtgtttgtcggtgtttctttctccccgctgaagccaagcttgcgaaagcgccgtgttcttttagcggcctgatcaggtttctgtgaagattgggttctgctttcggccggtgtatgttgttgaacttgacggtcaagacctgttaatttcatcagagcttctgtttttgttttgatgaaatgctccactaatgcgtcaatggtctggtactcgaaaaataaagtgctgcttacatggtcaaattctttacgcaatgtattcgtcagctggacaacaacgatagaatcaataccgtacttttcaagaggttcagatgactcaatctttcctgcaggaattttcaacgtttccccgattagttttttcatatattctgtgcttttttctcttaggagagcatgtttcgattgtccagcttcctctgaatctatggtatgaatgtaggctggctcctgattagacgcttgtgaaacaaccttctccggcaagatcacatttttcatcatacgtcgaaccagcccgttgcttgaggctgcgacgatttggtgactcagatcatgtgccgcctcggccgggaaaaagacagattcaaagccttcgctttcaagtgccgctttccagctgtcaggatgtaagcctggacagccgggaatccgcactgcaggatcttcatacagccaccagccttccaaaagaccaaaggtgatgtgagggaacaggctgtttcccgccatttcattcagcagcagcattccgttgtttttcattaccgcttttgtatgccgcagtgtttgacggatattttttgttgcgtgaaggacattagcggcaatgacgacatcatagcctcccgcttcaaattcctgctgatcaatcggtttttccacatcaaaaagctgatatgtcaggtacggattttccgccccatattccttttctgcatgcagcaaaaatgctttagacagatctgtatagcaatattcattgatgtgcttttgatatggtttcagtttttcaaagattccggcactcgtgccgcctgtgcctgcgcctatttccataatgcgaatcgatgcctcagggtcgtgcttcagacgttcatccagataagctaataatgtatcggcaagcactttattaaaatagtctgccacttggttatgcttataaatgccttccaccagttccatcgaggaatgcgggaacatgatatctgttgcagggactttccctgtcaaaatatccggtaatgcttgcagcatggcctctgctaatacaaccatcgcctttgtctcgctgtctttaagccacttttcttttttcgcgttccattctagccaaagcagctcgatatcctctgcttggtccttcctcaccaatgaatctccaactttcttaagatagccatgctgcaagagaaattcgctgctttgccgaatccattttccataaaattcacgagtcttatattgttgaagacgttcaaccgataatgtataaccatcaaacagctcggctgtttgcagctgtcctaacaacagcctgtaaagaagatcatcaagctcttcatgtgtcactctttgaaatcgtcccgtagtcggcagacgctccatcaggctctctgcatctgctgaaggttgctctggataaagagtgatgaattcattctgattcacgccttcgactgctacaggctttgtcgtatgaatgaaagctgtttggctgactggcccagaaagcagtgcttccagcgccttcatagcctccgcgggctcaattaaacctaagccgatttgattcatgagctgtacataatgttcatcctcagccgcttcactattcccccaatatccccagttcatgacttttacagggcatgcccagctctgagaaagctggtgagcaaaagcatctgcaaatgtacagccagaggcataatggctttgcttcacatttttgatatgggctacaagcgaagagaagaataaaacaaaatctacattctcctggcggaacacttgggccatccgaatactgacatcgatcttcgccgccagtccagcggtgaattcttccggcttcattttttccaggctttgctcaaataaaaccatcgcagagtgaacaatcccgtgaatatgaggatgacgttttttcacttgttcataagcctgctgcagtgaatgcttatcggctgcatcggctgcaatgtagaaaggctcagggccaagcgccgaaagtcggtctatttttgactggatggcagcattaagttgacttcgcccaatccaaacgatttgcgcctggtagcggcggatcatgtactcactccacgcctctccgatatacccggctcctccgatgaccacatagactccgcctttccgatatagcgtgtcgcctgacagtgaggaccgatatgggatcaattgctgctgatgccattgctgattacgataggcccaagcatggccaaggcggtcagctgggagcgcaaacatgtgatttaccggccatgtgcagcctttttcaagatcgagaagacggattttccagtgtggatattcctttgccattgtgccggcaagcccatgaatgcttgcatgagcgggttgtactgcctcatgttgcgtaaccggctgcgcttggacggtcacaagagaccattcaagttgtttctcgccatagcctaattgcaggcatgctttcacaagcttaaataagtgaagaacagcttcttcttgtccatcactacctatacttccccggtgtgacggggcaatccacaatacatggtcaatgcttccgtacgcttgcagtttgtccgctattgcctcaatgtcatctgcagggcggatatcgacaaaggaaatttgcggataatgatgctttatgaaagtccgatcagcttcagcagctccgcataaaacagctcttttaccagcaaacgaagcattatcctccgcttctagagagactggttcccagacggggatcatcaccgtatgcccggtcagctgagaatcagttaatagttgcggctttgaatgctgctctccatcaagtgcccgcatcgaggcacccttcattcgcacacaaacacgtccgttctcatcacataaatcaatgtcatactttctgactttgttctccgctttactgtctgaactgtatcgaatataagaccatatcttctctggacatgggctgaaaatatcaacctcctgtaacgcaaatggaagagacagcgtctgagcttgtccagcggcattgactgagctaacgataaaaccgactgtggcatggaacgcggaatccatcaaactcgggtggagcgcaaaatgctgcttgtcgttttttagaaaagcgggtaacgagatttttgcaagcaattgatctttgccgacatagactttttcaatcccttgatagccctcgccatagtcaagcccaatctttcgaaacgctgcatagcattgttctgacgtcactgtgtccaggctgcattctgtctgtattgatgaaaggtttaaaatggaagtctccgcttcatctgaaatgacagcgcgaccttggcagtgtatcgtcagggcttcttctttatgttcagagctgctataaatatcaaaggaaatgtccccgttatcctcaggaaaaaggccaatatgtatttcttttggttcactttctatcgtgataggacgcacccacacaatgtctttaagcgacaccactctttgttcgccgtccagatcgcctgcagctttttccgctgcttcccttgccatttctaaataggcaacgcccggcaaaattttctgtccctgtacaacatgatctgacaggaaaaattccgtgcctgtaaatacagagctaaagcgctgctcagtaaagtctgatgtattgcggtgcaccagcggatgtaagatatgattcacagtgctggttttcatttcaggaaccgagatccagtagcgctcccttgcaaacggataggtcggaacactgatcttaagcggcttgcgatcgccgtataggtcgtcccaggtgacccgctttccttgaacccatgctttcgccatttccatcatttcactgtctcttatcaaattgttattcagcgcatttaccgatgctagcccagccgcctcctgattctccttggctcgtccggtccagcagccctcgatctcttcttcgccattggcaaacgcccgaagtttagccgttaaatcttttatgtcttttacaatgaaggccgcacgctcctccatttcaacccgtcctgcctgcatggtataagctaacgctaaaagattgacgtcctcgctaagaaaatcaagaagtttaagagcgtaagcctgcagacgatctttgtttctcgcagacaaaggtatcactatttcttcatttttcgttaaaatcgtctctgaatggctctctgccggaatatattcttccaaaataagatgcgcatttgatcctgaagcgccaaacgaacttaaaccggcacggcggggatatgtgacgtccaccccgttttctgtaaaagatggctgctcccattcctttgtttcatgctggacaaaaaatggggtttgatcaagcttcaaataaggattcagctcttctgaatgtaatgacggcaccaaggttttatgatgcagctgcaggacagtcttcgttaagccgctaatgccggctgcagcttcagcatggccaatatttgatttcacagaaccgattgaacagaattgcttgtcctgcgtattgcggctgaaagcttttactaacccctgtacttcaatcggatctcccaatgaggtgccagtgccatgggcttcaacatagctgatggtgcgcggatcaattcctgttttttctagacatgcttcgattacatcagcttgagctaccgggctcggtactgtaattccgcttacttttcctacatgatttatcgcactgcctttgatgacagcatagattcggtcaccgtcctgttcagcttttcgcagcggttttagcaatactgtgccgacaccttctccagatacgtagccatccccgcctttgccgaaagtatggcaatagccgtcacttgagtgcatccctacactgccatagctgatatatttagccggatgcagtgacaaattgacgcctccggcaagcgcggcctcgcattctccattccggatgctctctattgccagatgaaccgcagttaatgaggaagagcagaccgtgtccaccgccatgcttgggccgtggaaattacaatagtaagagaccctgttggcgatttgcgcataattcagcgataaaggaaatggattgtgttctgatagagcttcagctcctataagagaatagtccttatgcataacgccggcaaacacaccgacatgctgtcttttattttctccctgcggtgaagcaattgtctctggtgtataacccgcatcttcaatagcttcccagcacgtctctaaaaataagcgttcctgagggtccatcatttccgcttcacgcggagagattctgaaaaattgaggatcaaagcaatcagcctcctcgataaagccgccccatttcgagagcggcttgcctgcaggtgaatccagtccatcgctttctttccattcccagcgtgagtttggaatctctgtgatgcagtcggtacccgctttaagctgttcccaaaattcctgtatatttttcgccttaggatagcgtcccgccattccgataatggctatgtcctccccgatctctggtgaagaggtaacaccatcaattggtgaaggagattggcggacagcatcgtccgcctctccaattgaatagtgatcagcaagatgagcagctagttctgcaattgttgtaaattcaaacagcagtgtcggagcaagatccgccccaaccttatctccaatttcctgaaccacggtaagcaatgacgaagaatccagaccaagctcatagtacccagcgtggatatccatttgttctgccggcctttcaagctgcttagcaagcagctgacgcaaatacatttcaaatgcgggatagtcccgactgatgttctgagagacagcagctctttcttcttgaatttcttttgcagaatgaaaggctgacatattccgtacagacttgcctgcaaattgtttcagctcggccactttttgtcctgctgaattaaaatattcaatcgtcatataagtgagttctttcttttggcgcacagatgaggagaggatccgtgctgtacatcctttttgcaatcgttctgaagcagaaaacgattcataatacaatggcaggtacatcgtttgatctgagatcaggcagcttgaacctatgccgctgccgtcaataagcgtcggatgaaacagaaaagcatcagaatgacgcaatgcttcctgtccgactgctaaatcaattacagccccctctttggcttcataaatctgtccttccgccttcatcatgccggtatgcactaactcttgagatcggcattgttcatagatttcatctaaattcagaatcctgtcagctgtacttttccactgattaaggtctattgattcggcaaaagcggtttgctctttacgatgcatgtcagcagtcacatattgtctcttgtcagatagtgattctccatgctgtttttgtccgtcgatgatgatggaccatgtcccttcctttctttcagacacgtgaatggtcagggcaatgtcatatgactcatctgcgatcaaagggtaaaaaatggttaggttttttaattcaagctcttggtatgcataaccatgttcctggaatacttggtagattaaatctatataagcaaggccgggtaataacgcttgtccatataccttgtggttggacatgattggattatttaatgaaatgtgcagttgttcagttatcattttcccactcctctcttatttgaaagttttccaaaacatatctttagaagcccctgtgtctgaatgcacttttttctgcacgttttgagctgatggtttgattaaaacgggctgcctatttaattccggcaaaggcagaggttttcttctaattggacgctcagccgagtctctccaaccttctataatgagatgggcgttcgttccgccatctgcaaaacaattaattgccgcagccggcgttgtctccttccactcggcttgcgatctgctgaaatacaaatctgttttttctatatcaaaatacggcatattttcattacctgacaggaacggaaccaattgtctatgcttcagcattaaagctactttaatcaggctcgcaattccctctgcacataatggatggccgatgttaggtttcaccgatcccagccctaacggagcctttgattcagaacggtaaatggactggattgcctttaattcaagtaaatctgttactgccgaccccgatccgttcgcttcgagatagctgatctcttcagtctttttgccgcttttttcaagcgctgacagcatgacgtccttttgtgcctcgagattcggagatgatgggcctgccgttcttccgtcattattaatcgcagcggctttaatgactgcatatatggaatctccgtcttcaaccgcttggttgacggttttgacgagaaccatgcccacgccttctcctaaaatgacaccgtctgcccgcttatcaaaaatatggaatgacggtttgtcacataaaagtccgcgctcatgaaacattcgatgcgcatcagcatcaagcaaactgacgccgcctacaaccgctgcctcaatatctccgcttcgcagagcctgaatggccatattcagccccaccagtgcagaggaacaagcggtatccaggacaatactcggtcccttcaagtcaaaaaattgtgagatgttagccgctaaatagttttgtccaccagcgactatcggattttttgcttttgaaagactggccggatcaggcttgtgctggctgcggcctcctatataaacaccagccctcatgcctttcacttctttctctgtataacccgcgtgataccatagcttcaagctttcctccaatacagccaaagcttgagggtccatcgctctgacatcgctttcggacatcatgaagaaatcatgatcaaatcggttcatttcatcaatgaggcccgcgtaattcgagctggagttcccgaatcgttcaggcggaacaggcgcaatcgcagaccgtccatcacgtattaaatcccagtattcctctagggtttctgctcccgggaacctgcaactaagaccgatgatagcgatgtcctcagcaagaagtgccgttttttcatggcttatctgttgcggccgctgttctggcaccagcttctgtttcattgctgattgcggcttgagaggtgtctgtttctcaggaacagatggctgtaaaacagctgatatgtcatatttcgaaatgagccagtgtgcaaaggattctattgtcgggtattcaaacaagattgacggatcaatatctccatttaattgttggttcatctgctgtaccagctgggccaatataatcgagtcgattccgtattcttggaaaggttcatccgtttcaaagtcttctgcagctattttcagttcatctgaaaaaagagttacgagccagtcgactgtttcagggaacaggttgcgagtgctggtttgctctttcgtctcaggatgcgagagagcttcgacaggcaatgacggctgcatcagcttatccggcttccaaacgtttgtatctggtactgccggcagcacgacagcatactgtctgtctgatagaatctggtcaagcagctgtaatccctcgtcgtttgtcaaactgatcaatccagtttgttctaaagctttgcttcgaacctcgcctaaaccggtctccttccagttaggccactgaatgcttacaatgggacatttatcttgatgagcctccgcaaaataatccataaaagcatttgccatcgcgtaatcagcttgtcctgctgctagtgcagggatggccgctgatactgatgaaaacaaggtgaaaaacgccaatggttcatcttgaagcaggtcaaacaacgtttgcagaccttcgactttcggttcaagcacctgtccgatctcttctagtgattttctgataaaagccgggttttgtttgttcaccatcccggcacaatggatgactccgccaatcgcccccattgtttcgtgtattgtcttcaggctctgttcgacagcaaccctgtctgtgagatccagagacagcacctgaacttgcgcacccatgtcttctagctcttgaacggcttttattttctcggcaagcgaggaaatttttaccgaattccactggtcacgcggcggaagctcttcacggccgataaggaccagccgcttaacgccgtatgttttcacaaaatgccgcgcacacagcaagccgagacctcttgtcccgcctgtaataagcaggactttgtctgttgaaaacgatacttgcttatgacttagagcggcttctgctggctgctctgtcaaatatgcgcgatatcgctgtccgtttcgataacagacttctgattctgtgctcttggcataatattcaactgcaatcagtctggccagctcctcatgagaggcttcgcattccatatctgcatgtcttgaagtaagatggctgtactcactttgaagcatgcggtataaaccggcccgtgaagcaccagacaaaagaacaccctcatttgcgtaggcctccagcccctttgttacacccaagaccgtcaaatgatgcttgcttgcacgtccttgctcgatcagcttttggagccagtttatccagcccatagaatgctcatggctcgttccgcacccgatcagatcgattgctccagcaacgtgttcatagtcagcagcagatacccgatccagctcttggctgtcaaatatacggtatgtcgagaaatacgccgaaagctcttccgctaatgccattgtctcctcatttgccaaaatggcgacggtttgattcgtcatttctgccggttcaatcggacaaggctgccactgtttacgcagaaagcagcgctttggcatcagttcgaattgaggcattgctgtagcaatggtttcgggttcgccttcttgagttggcagccagtaatactcttccgcgaacggataagcaggcaggctgattcggcgaggcgtgtattccccataaagcttgttccaatctatctgcagccctttcacccatagctctgctactttctccagcctttttttctctatccatgtttgcagcaatgctttggcatcatgatccgtttcaaacagcttgatttcgctcttcttcgttttcacgtgagcagcaaatatgctgccgttcggcatttcagccaaataatcatctaaagctttgatcagcatttctctcgaatccgccaaaaacgccatgcgataatccattgcttcccggcccgtctgaagtgtgtatgccatatcctccagatcgatatcttcattggaagttacgaaatctttcattgcttccgcataggccttcaattgcttctcttttttcgctgagagtacaaataatgctgagcggtgctgctttgttaatcgatcgttcctcttttcaggctgatattcctctatcacaatatgggcattcgttccgctatatccgaaggagctcacacatgctctccgcggttttccatcagccgtttcccaaggcttaagctccgtatttacgtataaaggagaatgctcaaattcaaaatgctcattcggtgtcgtgaagttcaatgtcggcacaagtgttttatgattcatgcacaataacactttttgaaccccggctactcctgccgccgcggatgtatggccaatattgcttttgacggaaccgattgcgcaaaactgctttttgtctgttttttcttgaaatacggtggacagagcttctaattcaattggatcgccttgttttgttcctgtgccgtgcatctcgacataactgatactctcaggatgtatgccgtatgtttcatatatgtctctttccagatccatttggcttttcgcactcggtgccgtgattccgtttgttttcccgtcctgattaatacccgagccaatgatgatgccataaatatggtcacggtccgcttccgcatctttcagccttttcaataccagcgcacccgcaccctcgccgggcacaaaaccattcgcgccattgtcaaatgctttacattgtccatcaggtgaaagcatgccggcctcacacatactcatgtaagattccggcgtcaggtataagctgaccccgccgaccagcgccatatcaatttctttgtttataagtgcctggcgcgctaaatgagtgccgaccaatgaagatgaacatgcggtatcaataggaatcgctggcccttttaaatttagaaaatacggaatacgcgccgctgcgatcgcaaagctgtttccggtggcatttgctcttgactgccgattcagcatgaccccgtattcattgctcataatgccgagatatacaccgcattttttctcatttaaagttcgggcgttgtacccagcgtcctcaaaggctttatagccttcctgcaaaaagattcgatgctgcgggtccatcagttcagcttctgacggcggaatattaaaaaacaacggatcaaaatgttcaatatcatcaagcatccccattgatttgcaatagactttcccttttttgttgaggacaggatcatagtatttgtcaacatcccaccgtgatgttggaatgtcccgaatggcatttctcgcatgaaccaggttatcccagtactctcttacattacgagcgcccgggtatcttcccgacatcccgacaatcgctatcgcatcctccgggcggtcttgaagaacaggaaccgttttcttctcatgttctttctttattggatgttgaacaggctgtagtggccgttctgccggctttggatgagatgatgctgctggcttttgctgggctgcttcgaaagagtcagtatgctctatctttctatcaagatgagttccaagctcggactttagcatttcggcaaaatcacgtatcgttggataatcatatactctggttaccgtaaaagacgttccgtattgcttgttcaccgcttttatccattcgagtccggtaatcgagtccattccgatatctatgaacgcttcgtcaatatccacctcgtatggctccatgtataacacgtctgctatgctttccctcaagttttcatgcagcgtttcaattgctacagtatattgtcttgatgcagatatttctgccgctgcatattgaatcgtttcttcagcttcctcttgcactggctgatgatgttctaacggctgcagagatatattagccggtttagcagcaggtaccactgttttttgtctgatcggcgtgtacgtctccgtttgttttttctccccagcttgtgtgcttaactcgtgtgctaagtaaacagcgaaatcacgtgttgtcggataatcatatacctttgtgacatttagtgatgtgccatactgtttatttattgcttttatccattcgagcccggtaatcgagtccataccgatatctatgaatgcttcgtctggatcaatctcgttttggtccatgtacagcacttccgctaagcccgctgtcagttcatcgcacaaggcttccgccgtgatcgtctctgtttctgtatctgatggaacacgctctaaacgatcctgattggtcattaaaggctgtaacgtaatattggcaggcttgccactggcttctctgtctacagacggcttcggaataacgggctgtactggagcgaatggctcctccgttcttttttcctcagcctttgcatttacgtctatccaatagcgatctcttgcgaaaggataggcaggtaaactgatgcgccgcggtttttgatcctgatatagcgtgctccagtcgattcgcaaacctcttacccacaggtctaaaaccttcgcatattttcctttttgcagccatgcctcaattgtttttgacatatcctcatcagcagcaaaagcagcaatggcttctttgttgctctttacttgtccgcgatagacatattcacgattttctgttccggagatacattcatacagcttttcttcaagctcttgcatcgtttccgcaacgaacgccagccgttctttcatcgcttcccggccgacttgcagcgtataggcaattcggtgtaaatctgcttcaacatatgtttgttcacgaatggcatgcagcaatcgctccgcgcgtttctgaagtctttcctcattttttgctgagagcacaatgacagccggctgtttcctcgctggtaaacgttcctccacaggttccggagcatactcttctattaaaatatgggcgttcacacccccggcaccaaatgaagagactcctgcgattctcggtaattcgatgtctttgccattgacactgatgatcggcctcttccactcttctagctcttgctgtactttaaacggcgagttaaggaaatcaatattcgggttcagcacgtttgaatgcagggaaggcgcaagctgcctgtatttcatttggagcaataccttcgttactcctgcaatacctgccgcactctcacagtgcccgatatttgatttggctgaccctattgcacaaaattgtttgtcatcggtttcttgcgtaaacactttggacagccctgtgatttcaataggatcaccgagagaggttcccgtgccgtgggcttcgatgtaactgactgtccgcggatcaaccttcgcttccacaaacgcctttttgatgacatctgcttgggcattcggattgggcactgagtacccgtttgtttttcccccgtggttgatggctgtccccttaatgattccataaatgtgatcaccatcttcaactgctttagacaatggcttcaaaagcactgctccaacgccttcccccggcacatagccgtctccgccctgtccgaagctttcacatcggcctttgctggacataaatttgttctgcccgagcatcaaatatttatttggatggattgacacattcacgccgcccgcgaatgccgcctcacattctccgcgctgcaggctttggcaggccaagtggatagccgttaaagaagaagaacacatggtgtctaaagcaatactcggtccgtgaaaatcaaaataataagatacccggttcgcgatggatgatggatttcccgttaaagccagagaccttccccgcacctgctcttgtgccccgtacagctgatattcttcgtacatgacaccgacgtaaacaccgacgcttccgccaagctcagcatcacgcttacggccgaggtgctctcttgtatagcctgcgtcttccatcgtttcatacacgcactgcaaaaataaacgctcttgcgggtccattaattttgcctcacgcggcgaaatatggaaaaactgcgggtcaaacttgtctacatccttcatgaagccgccccacttgctgtaggtttttccaggcttgtctttatcttcgtcataataaagactgtgatcccagcggtctgcaggaatttccgtaatacagtctcgcccgtccctcagtttttcccataattcatcaatgttgtctgcctgcggatagcgacctgagataccgatgatcgcaatttcttccgtttccttctctcttacctgcttctgctctttatcttgcaaaggaagaaatccagactttcttgggataactgggatttcttgtttttcaggttctgattttctttcaacagaaggttttcccgtttcaaatcccaagatgtccagcagtttttctctgcgggaatcaataaaataccgggttaatgaccgaatatcctggtattcaaagaacagcgtcttggacaaagatccgaatactttttctaattgacccgttacatgcatgatcatgatagaatcgatcccgtaatcctcgagaggagcttcagcatcaatctggccagctggcagcttaatcaccgaagaaagcacctgtttaaaatagttctccgctttttctcttagtatctcttcatcaatttccccgatcatgtctgctttttctgcctcctgattgagactgctttttttgatattgtgagattggcctttgccatgtcccgtttcatgtaaaaatgcacgaatccgatcagtaacaccggaagcaactaacacttgcggctttcctgacgtccagccatgatatagcgcctgaatcccacgatctgtttccatggccaccatgcctgtttctcttttcagcatccttgcagtttccgcatcaatttgcatgcccccgtctttccacagcggccagcacactgaaagagtttttccgtaacgcttatgcagctctgcttggccatttcgatattcgctgaatgcattcataaatgcattggccattgcgtaatcagcctgtcccgcgcttcctactgctccggcacctgaggaaaaaaggataaagaaatcgagcggaatatctttcgttgcttcgtcaaggtgaatcagtcctgctacctttggagcaagaacggtttgaacctcttctttctttttcttcataatgaaattatcttttattaaaccggcgctatgaatgatgccatctaagtctccgtaaacgttttgggtttcttttaataaggcatcaaccgtttgtttgtcagccagatcagcttgtctgtaaatcgcttggatgccaagtttctgtaaggctttaagcttcttcttcttcctttcatcaagcggagagcgtcctgtcaggatcacaaccgcatcattcgtttggtttgcgatttcagttgcaaagatgaatcccagaccgcccgcaccgcctgtgatcagatacacgcctttatccttccatggcatgtcagcacttaggtgctcaccagacacttctttccacttgcttacaaatcgcttcccttgccagtggcggatatgcgtgtcacgcggatagcgtctgttttcctccaatatttcgaatagctcaccagctgacatcccggtttctatttcgatcaactgtcctgtcagttttggattttccagttcagccgttttgagcaatccagttaagccgcttaatagctgaggctcgtccaacgcaggcaccgccacttgaatgaatgtatgtcctcctgtttttgagtgcattagctgtttgatttcttcaaataactgtatggcataaccttcaaaccgttcatcaattgtctctgtatcatgctgcagaactgtacagtcaagatgattttggaggctttccatttgttctccaacatcacagacaacgactttatacgtgtcgtactctatgagctcttgcctctctgcagcacgttcttcccaaatatgttcgaacaatagcgtgtcattcgcttcagaaggaccttcttgatctgtttctaacactcttgcagaatagctcgtcaatcgcacgcaaacctggccctcttcattgcataaatcgatatcaagcttctgcatacgatccccagctgtactgccctcgctatatgtgatccgcgcccacatagatgcctcgcagcctttgaagattcggacatcctgtatggcaaaaggcagcattgcctttctgtcttctaaactcgtagctcctcccagcctcaaaccgatagatgcttgaaatgccgaatctatcatgctcggatgcagaatataatggtcttctgtatcagagattacaggaggcatcgtcaatttcactagaactccgttttcgccggcatataggctgtcgatcgctctgtggctgtcaccataatgaatacccatttctgtataagcctcgtagcaatcaaaaggtgacagcgtccggccattatagcttgccttcaattcttcaatgttgataaccggattttcaccagcctcacaaagcactgcactcccttgcccatatacaatcggcgactcctctgcgctttcagggtcccggcagatttcaaatgtaatctcaccattttcctcaggatatagacgtacatctatatctttctgctgttccgtgacggcgaacggccggacccagacgatattccggagccggaatcctgtcgggaactgatccgcagctgccctttccacagctgcccgaaccatctccaataaagctgcgccaggtaaaacgtgttcgccctttatgacatgatccttcaagaaaaattcacgtcctgtaaacgctgaacggaagcggacacccgatatgtcggacacattttgatgcagaagaggatgcaggatgtgccgctcctgttttgaacgatcagtctttttctccgctttcggcacccaataacgcaccctctcaaatgggtaagtcggcaggctgatccgctttggtttgcttccctcgtaaagcagcttccagtcaacaccagatccgttcgcccactgctccgcaatctgatcgagttttctttgctccagcaatttatgtaccgattcggcgggacgcgatggttcgcttcctcttgacacgcggcccttccagcaatgctgaatggcttttcgtccttctataaaagccttcaattggtcgctcaattcttgaattccggatgctaagaaagaaacccgttcttccatcggttcacggcctacctgcaatgtatacgccaaatctctaatctgaatcccatcatgaagaaaatccaagagacgttttgcatatacacggagacgttcttgattacgggcagaaagcggaataactgcggatatgtcagaatctgaggacaaagaaacgtcctgctccgctgcttgaggaatatgttcctcaaggataatatgtgcgtttgaacctgttgcgccaaaagaactgatccccgcccgtcgcggataagggacgtcttccccattctccttgataacaggctgcttccacgtttctgtttcatgctgtacataaaatggagacttttcaaaatcaacgtacggattcagttcttccgaatgcaaagaaggcacaagtttttgatggtgaagctgaagagcaaccttgcttaaaccgctgatccccgcggcggattcggcgtgcccaatgtttgactttacagaaccgattgaacagaactgccgatcctgcgtatattggcggaacgctttcactaatccctgtatttcgatcggatctcctaaggacgtgccggttccatgggcttccacataactgatcgtccgcggatcgattcccgttttctccaagcatgtctcaatcagatcagcttgggaaacagggctcggcactgaaatgccgcttacagtgcccacatgattcacagcacttcctttaataactgcataaatgcgatctccgtcttcctctgcctggcgcaaaggctttaataaaaccgcgcctataccctctgcaggcacataaccgtctccatcctttccaaacgtacggcagtgtccgtcagtggaaaacatatcccagaccccgtatgtcatatatttattcgggtgcaaagacaggttcactccgcctgctaacgcaacatcgcactcaccgtgacgtatgctttccaacgccaagtgcactgcggtcaaagaggatgaacataccgtatcgacagccatactcggaccgtggaaattacaaaagtaagaaacacggttggcgatttgcgcatagttgagcgaaagaggaaacacattttctgctgatgcttcttcagctccgactaatgtataatccttgtgcatgacgcctgcaaaaactcctacatgctgccttttatttcgtcctttaggcttggccaacgtctttggcgtatagcccgcatcttcaatcgtttcccagcatgtttctaaaaacagccgctcttgagggtccattgtctccgcttctcttggcgtgattctgaaaaattggggatcgaagcagtcgggatcatcaataaatcctccccatttggaaatgtccttacccgaaggagatgtgattccttcaagtcgctgccaatcccagcgcgactcaggaatctcactaacgcagtccttaccctctttcagattgttccaaaattcatgaatattggctgccttcggatacctgcccgccaagccgataatcgcaatatcgcctgctgcctcaataggtgcaggacgagagccttcaacagtcttatggtcgtttatgctgtcggaaacgcgtgctctttcattctggccaagagaaccagcggcactaaaatgctcagcatattcctcggcaagaaacgctgacagttccgctatggtggtatgctcaaacagaagagtcggcgaaaggctctcaccgatcttatcactgatcgtttctaccacctcaagcaagcccgatgaattcagtcccatttggtaataaccgacctgtttttcaacttgttctaccggcttattgattttctctgcgattaattggcttacgaactgttcagcctcactataggaattaacgggagaagataccatgtcagcaggtttatcacgctcagcagtgtccgctcttgtcatctgtgtctcctgtgcatcttgatgttttccgctaatcagctccgcttctcgcaccaatttgcttgtaaagtttttcaactcagccactttttctcccgacgcattaaaaaattcaagtgttacataaatcagctctttttcccgccggacggaggagcgcttaattcttgtcatgcaatccgtttgcaaaagtgcagaagcggaaaaggattcatagaacagaggcaaatacagcctctgttctcctttaagcaaagatgtgagcaaatgattggcacccaccccgctcccgtctatgagagtcgggtgaaacataaagccttctgcgtgaagcatggcctccgaaccgagagaaagctcaagaaggacgccgtcttcctcttcatagatgcagccttttgctttcatatattcgctgtgcaccaattcctgacgtctgcattgttcatatacatcatcaagctgaacaacgttctgtgcagatgctttgatttgactgagatccagtgtttcttcaaatatggctggggagtctgcgtgcatgtcagccttcatatagagcttttcttctgaagcttctttcccatcacgtttttcaattcccttggctgtgatttgccactgtccttcttttttctccgcgcattggatattcaaaacaattactgcatcctgttccgccgtcaatggctgatagatggataaattccgcagctgaagctctgagcaggagaaaccgtgttctctgaatatctggtagattatatcgatataagccaatcccggcaggacattttgtccgtaaaccacatggtgataaataaacggattttttaacgataatgtgagttgtttcgttatctttttcacgttagacctccacctcataagtatcccatatgtttgccgcagtcatttttgaagtctccgcttccagctttggctcgcctggcgaaagcattcgtttctttaattgaggaggcgatattggactgcgcttgatggcgtgtttttcatctttttcccacgcctctacgatgacatgggcattcgtccccccatcggcaaagcagttaatagccgcagtaggctgcgaatctgtccatttttccagggctcggctgaacgtgatgttcgctttctgttgatcgaaatgcgccatctctttttcacctgataaaaatgggacaaagcggcgctctttcagcatcagcacaaccttaatgaagctggcgatcccttcagcacatagcggatgcccgatgttcggcttgattgagccaagagaaagaggcgatgagtgcccagaacggtacactgattggatcgcttttagctcaaggagatcggttacgattgaacctgacccgtttgcctcaaggtagctgatgtcctctggtttttttccgcttttgaaaagcgcatctttcatgacttccttttgtgcctcaagattaggtgttgcaggtcccgccgttcttccgtcgttattgaccgaggccgctttgacgacagcatatatgatatctccgtcttccagtgcctgttttacggtttttagcatgaccattccgacgccttcacctaacacaactccgtcagcacgctcatcaaacacatggaaggatgaatgcttgcttaaaatgccgcgccggtcaaacagcctgtgagacgcatctgagctcagcaagctgacaccgccgactatggcggattgaatatctccgccacgcagcgcctgaatggccatattcatgccgaccaaagctgacgagcatgcagtgtcaactacaacacttggaccgcggacatcaaaaaattgtgaaagattagcggctaaataattttggccgactgtcacgatcggattcttggcatgatcaaggctgtcttcatcaggtttgtgctggcttctgcctccgatataaacaccgacgggcttgccctttatttcctcaggtgtataaccggcgtgatacaagagcttcagacactcttccaacacgagcagtgcttgcggatccatcgcccttacgtcttcttcgtgaagcaaaaagaaatcaggatcaaaatagctgacgccatcaatcacgccggcataatatggcgtcttacagccccaacgctctgccggaatcgggccgattgacgaacgcccctcggatagtaacgaccaatatgactccaatgtctctgccccagggaatcggcaagagagtccgacaacggcaataccttctgcatgagagtccggtgacaaaatcgctggcgcctgaatctgaggtgtaagagctcgatccttcccaggaacagatgcctccgcctctattttgttctccaaaggtgctgatgcatccgatatcctgcctccgaataaagcggacagcctttcggaataagaaccgatcagccaatctgcgaacctttgaattgtcgggtattcatatagaatcgatggatcgagcgctgcctctaatttgcggtttatacgctggagcacctgtgccaaaatgatcgaatccacgccataatcctgaaacaacccgtcaatctcgaagtcttcacgatctattctcagctcttcggtaaacagatcaataagccaggactgtgtttcagataataatccatcacatttggaaacttcatcggcctcttcaatgtctctggctggcgggctctgtaaagcagcttcctgcaaaccgccctcatgcggtttcctcctcttcatcagcagttccggctcccagtttgtttgattcgccattgcagggagaacaaccggtccgaactttttcgatacaatttgatctagaaaacgtaagccttctgaattcgtaatgctcaacaagccgctgtcccgatacgcttgatttgtcacttcacccataccggtttctttccagttcggccactgaacactgatgatcggcgcatgtttctgatgtgcttctgcaaaataatccatatagctattggccatcgcatagtcagcttgtcccgccgaaagctccggaataatggctgaaacagaagaaaataagacaaaaaactgtaaaggctcgttacacacatggcgatataacgttgtaagacctgacaccttaggttccagcacccgctggatatcatccgaagtttttcggataaatgccagcgtatccatatccgtcagacctgcacaatgaatgacaccgccaatcggtcctaatgttcgcttgatatgttgcagcgtttgctcaacctgagcatcatcagataacgtcagcgacagcatctccacctgtacacccttcgcttccagctcccgcactgcctggattttctctgccaatgatgtgtttgatgtcttaaaacgagcccactcctctcgcggaggaagctgttctcgtccggtcagcaccagttttttcactccatagcactctgcaaaatgacgggcgcataatagtccgatgcctcgtgtgccgcctgtaatgagaagtacatgatctttcgggaagaccgcgctctgttccgtggccttacctgtttccggatgagcttttagaaaagcttgataccgtaaaccatccctgtagcaaacctccgcatcataagaatcggaataaaactcatcagcgatcaacttcgcgagacggcgatgatcagtaacctcctcagcatccatatgccttgatataagatggctgtactcgcattggagcattcgatacaacccagcccgtgaggcgccagccatccggacagatgtgttttgaaacgattcgagccccttcgtcacacaaagcagcctgagcccctctttatgcccgaattcaaccagtctttgcacccattcaatccaatccagccggccctcatcatcccaaccgcatccgatgacatccactaggccgtcaaactctttccaatcaatgtctgactgatcattttctatccggctcacatctattaagagatgattcggaaaatacgaagacacttctgctgctaaatctgctgtctcttgacagcacaggatggcaacagttcttgtccccggcactgctgatccaattggactcaaactccattgtttcgtcaaaaagcatgcggcgcgatcttcaatcgcattaaccagttcttttttgtctctttctgaatgttcctttgccggcacccaatagtgatccttcgcaaacggatatgaagggaggctgatcaggcgcggtttggtctctccgtataatgtgttccactggattgagacccctttgacccataaatcagcaagtttggcgtattttctttttctgatccaagcatcaagtgccaacgccatatcttcatctgctgtaaaaatagtctgggtctctttatttcgatgagactgtccccggaaaaattcgtctgtttcttccttaccgtcaacaaacgcctgcagtttctcttcaagctcctgcattgtccccgcaacacacgccagacgctcatccatttcttcgcgcccgacctgcagggtgtaagcgatgcggtgcaaatcctgatcagtatattttttattgcgaatcacctcaagcaattgcgaagcacgatctatcagcctgcttttatttttagccgacagcacaattacgtttggctgttctgtagccgtgtgttctgaattggcttttggcatatattcttcaatcacaatatgcgcgtttactccgccaatcccaaacgaactgattccggcacggcgcggaagctcgtttccgtcacgatctgtgacagacttccattcctgtttttcctgaacgatgtaaaacggactgtcagtcagctgaagataaggattaagcgtctcgcaatgcaggcttttcactaacgttttatgcttcatttgcaaaagcaccttgatcaaaccggaaataccggctgctagctctaaatgaccgatattgcttttaactgagccgatgccgcaacggtgatccggaacatccggctggctctcgcctctcatattggatagttccttaaacgcggctttcagcccatttatttcaatcggatcgcccaattccgtccctgttccatgtgcttcgatatatgtgacagtgcttggatctatgtctgcttggcgatatgcacgcaccaacaaatcagcttgtgctttcggattaggcgatgtcagggtattggctcttccgccgtgattttccgccgtgccccgaataacgccgtaaatatgatttccgtcgcgctcggcatcttccagctttttcaacatgaccattccgaccccttcgcctctgacatagccattcgcatcggcggagaaggttttacacctgccgtctgtgctgagcatccccgccttgctgtagctaatatgcgcctcctcggttaagatcgtattcacgcctccagcgatcgccatctcacaatcaccgttttgcatcgcagtcacagcacggtgaatggctacaagagaactggaacaagccgtctctactggctcgctcggaccatgaatatttaaaaaataactcattctattcgggcctaccgaaggaatcatatgacctgtagcagcatggccttcaattggaagattcgctctatggaatagatctttataaccggtgtttcccgtaccgataaagataccggtccctgtacccgaaaggctttgcggcgagcaacccgcatcttccaatgccttccacacgtatgtcattaacaagcgctgctgagggtctacataatcagcttctcgcggcgaaataccaaaaaacaacggatcaaactctgcgacaccatcaataaacccaccccatttgatgtcggttttattgacgtcagtgtctgggtttccataatgctcccgccaatcccatcgatcttttggaacttctgtgatgctgtcttttccttcttctaggtttttccaaaattcgtctatatccatagcgccagggaaccggccgctgatgccgacaattgcaaccggctcaaaatcggcagcctgctttttgtttctttctgcttttgcaataataggctgtgtaaagcggcgctttctacgtgatgtgattttcggcgcttcagaagattttgtctgtaactcttcctgcccctctggtttttctcgctcctgaaccagggtgtcaccatgttcaacggtcaaatactcagccaggctgtggaggcttccatattcaaagaaaatggtcggcgttagctccaactgaaattcttcgttgatcttgtttgtaaagaccgtaaatgtaactgaatcaaatccgtattcactcagctctgtattgacatcaatatcttcactatttacttttaaaattgcactgaccatgttgcttaatgatgcctccaggctgcttaaactgtgcactaagtttgttctttcatctttgcctttagcagtagcatcttgattccattcgccctgatacgcagcaactacatattcagccaggctttggacgctgccatattcaaagaatatggtcggtgttagctccaattgaaatttttcgttgatcttgtttgtaaagacagtgaatgtaactgagtcgaatccgtactcactcagctctgtgttgacatcgatatcgtcagtgtttactttcaaaattgcgccaaccatttggattaaggctgcttccaattttctagtttgtccttgatcctgatccgcctttctctgatcgttccgcttggctttcgatcctgcggaaagcagtttttgcttcattttctgaagctgtccttccatcacaaaaacttgcggcttatcagatactatcccttgataaaatgctttcaagccactatctgtcggcatcgggaccattcccgtcgttttcagcattctcttttcatcttcagcgccgacttgcataccgccttcttcccataacggccaattgaaggaaatggtggagccgaatctcttttttgatgccgcaagagaacggcggtattcagcaaatgcatccataaacgaattggctgccgcataatcggcttgtccagcgtttcctaaacatcccgaaacagaagagaagaaaatgaaaaagtccaatgggaaatccttgctgcattcgtctacatgtaacaacccgctcacttttggctgcaacacttcttgaaactcttcattcgttttatgaatgatgaagcgatctttactgctgcctgcaccgtgaataattccattgagagtgccatatctttctttgatttcctccaaaagatgacgaaccgcatgctgatcacttacatcagcctctcgatagacaacctccgctccgatgcttcgaagagcctccagctcgttttccttatcctcacttaaaacagatcgtcccgtcagcacaatagtagaccggccagttcgattggcaatttcctttgcaaacagaaggcctaagcttcctgctccgcctgtgattagataaacaccctcgtctctccacggcatgtgaagcgtatcagctgaaggaagcaccatttccctccagcctttcacaaaacggtatccagcctcatatcgaatctgtttgtcaaatggtctccggctgtcgtctttcagcttgaggtgaaggtctatcatctcttcaggtttctcaatttcgatgacctgagcagtcagtttgctgaactctatttctgctgttttaaacagaccggaaacgccggcaaacaattgcttctctttttccagcggaacaatcgcttgaatgatgatacggcctgcagaaagcttacggaccttgctttgcaggagttcaaaaatgttctgcatgtaacattgataacgttcagcaatatgtcctacagcttcgtttagagtaatcacacgggcatctttcatgtgggaggcaatgctgtctgtgacacttcgttcagtttcgaagagaacaatgatatgctccgtgtacgaaagatcttcgtcctctcgttcttcattctgtttttcccacaccggttcaagcattaagcgttcgtgccgtgttgaaggctttgaagtatgaacctccccttctaatactctcgttgaaaatcctttgatcctgacacatacggttccactctcgtcaatgacatcgatatccgctttctgaacaacccctccggagtgatcgctgtcacttaagcgggcataagcccacatagaagaagaacaccctttgatcacttcaagctcctcaagcgcaaatggcaaaatcagcttttgatccgtcaattcctgcatgatgcatattgttgctgtctgcaaggcggaatccatgatacttgggtgcagcacaaactgttcattcgttccagaaacgatttctggaagctgcagctgcgccaaaacctctctgtttcctatattcacattcttaattccttgaaaggccggaccatggaacattcctctgcttctgccttcttcgtaaaattgatcaggcgacatctttcctttgccgcaacggcgtgacatttcagtgagatctgcgactggcgtttcggcggcagatgccagctccgcactgccttgactatgaataacagggtcgtccccgtcttcctgtgtactgtaaatgtcaaaggtgatttttccatcttcttcaggaaagagactgatatccacttgagctgaatgtctgtcaaccacaacaggctgaacccagactgtatgattcaatctgattctgacatcttggccaatttcacttcctgccgcctggtttatagccgcgtacgccatttcaaggtacgcaacaccaggaagcacaggctttcctcttaccacatggtctctcaggaaaaattcgtcaccagtgaaaaccgaactgaatttctgttcagaaaaatcagatgtattctgatgaagcaatggatgaatagagccgatccctgtctgatttccggatatctgcgccaccggtttgcggtcatcctgcgacggccagtatcgttcctttgcaaatggataagtcggcagactcattctgtttgggcgctctcccttgtaaagctgcatccaatctatatgcgctcccttgctccacatttctgcaagcttgtttacttttcctttggccatccacttacgtatgagttcagcgctgtcctcatcctccgtcagccatgaaacctctctggcattgtgcttacttccttgaaaacagccttcaatcgctgtatttccattgataaaatctgtgagcctctgttttaactcatttacatgatcggcaataaagacaacgcgatgctccatcgcttcgcgccccacctgaagggtatacgcaaaatcaggcagctggctgttctcaaaccctcttctttctaaataggccagaatgtcttctgcatactcttgcagcctctctttatttttcgccgagatcgggacgatgcaggttccgtctatctttcccttatctgaatcccttttgaattgttcaaaaatggcatgggtatttgtcccgccaagcccgaacgagctaagtgcagccctgtgcgttttgatctcacggcttaacgttttcttttgatcgacgacgtaaaaaggagagctggctaagtctgtatttggattcggctccttataattgacactcggtgcaagctcttgatgataaagactcatcacaaccttaatgcagcccgcaagaccggcggctgtatctaaatgtccgatattggttttcaccgacccaatgccgcaaaattgcgttttatttgtatattgcctgtaaacgtttgttaaagccgccagctcgatcgggtcccccagcttcgttccggtcccgtgtgcttctacatagcagatggattcaggctgtaccttcgtttgattcatgacctgttggaccacgtcagcctggcctttaacgcttggagcataaaagccgactttgtcagcgccgtcgttatttacaccaatgcctctcagcaaggcatagatatgatccccgtcctttactgcatcagctgcttttttcagcaatacaacagcaacgccctcaccgcctatcattccgtcagctgaagcgtcaaaagctttaatatgtccatcactcgaaaagttcagcccaggctgatgcacatatccgatatttgactcggtatgcagcgttgcaccgccaactaaagcataatcagattcacccgacaggaggctcttataggcagaatgcaatccaatcagagaggatgagcagttggcatggacaaaatagcttggccctctcagcccgagcttatgagaaatcattgtcggaatcgtcccgctctgtgcaagcacccacgaaacatagccgtccggcgtctccaggctctctgttgtatctgacggcagcagcgcgcgataagaattattgcttgccgacataaaaacactggtttgcggaatctgcctcgcagcataaccggcatcttctattgctttccatgaatgagtcagcagcatccgaagctgagggtccataaattcagcgtctttaggagagatttgaaagaagcttggatcaaatctgtctttcccatcaattgaagctttagcagggacatagtcggcattctccgctatctcctttgaaatgccaaagcgctgaagctcttctttattgaaaaacgcaatgctttccttgccgtctctgaggttctcccaaaattcatcatgattttttgcccctggaaattcacacgatatgccaataatcgccacactatcgtcataatagtccgggagatcactcatctcggtagactgatcttctatatgagctgccgggtctgtcggtatatggtcacttgcatcgcccattcgctgttcagtgatgtactggctgatatttttaatcgttgaatactcaaacaggtctgtgacagaaaactcacaggatagttcatgtttgatacgatcagccacagtgaccgcgagaagcgaatccccgcccacatcgaaaaatccgtcatcccattcaatgtcactcgttttcagcacttcctgccaaatggtaaaaacagtatcctgaatgttcttaggagaggtctgcctttgctttagctgctcccctgataaatcgatattcttaaggctgtttctatctatctttccgttcggagttaacggcatatgatcaagctgaataaaataagaaggcaccatataggcaggcaaagcgtttttcacaaaatgacgcagctctctcgctgtgagagaagcatttgcatgtttagctgtataataggcagctaggttatccatatctgcgaccacaacgcattccagaatgccgggatgctcactaagcctgctttcaatatcaccaagttcaatacggaatccgcggatttttacttgattatcgatgcggcctatatattcaattcgccctcccgtaagccaacgggccatgtctcccgttctataaagcttagacccaggctcaaaagggttgtcaatgaatctcgaatccgttaattcttcctttttgtagtagcccttcgccacaccgtctcctgcaatgcacagctcacccggaacacctgccggcactggcgcgagctgagaatccgtaatatagatttgtgtattggcgattggccttcctatcgtggcatgagagcattcaacgttaatgcgctgaaccgctgaccagatagttgtttcggttggcccgaacatattccaggcttcgctgcccgtatctaagaaatatcgttttaatgtctcaggcaatgcttcgccaccgcataaaattttcacgctctcttcattttcccagcctgaataaaagagcatcttccacgtagcgggggttgcctgcatcactgtcggtttgatcgcgcggatgtcccgtttcagtttttcaacgtcttttgtatgctccgtttgacaaatatagcagtgtgcgccctttattaaaggcaaaaataattccagagctgcaatatcaaaacagtaggttgtgacagcaagcattttatcctctgccgtaagacctggtgtttcccccatcgaaacgagaaagtttgtcaaagctttatgtggtatcatgacaccttttggctttcctgtgctgccggatgtataaatgacatatgccaagttctctggcgtgacagtgcgtgtaagcacttttcgatcagaggctgtttgagcaatttcatcccaatcttgatctaaaagggctgttgtgacaccgttccaactcaacgtatttactaattccgatgtcgtcagtgtaatgaaaacttcactgtcctcaagcatgtattctaatcgttcagccggataggacgggtctagcggcacatacgctcccccagccttgaggatcgctaataaacccactagcatgtccagcgatcgatccacatagatccccgccagacggtcaggacccactccatgcgcctgcaaataaatggccagctgtgtgcttttctcatcaagctcccgatacgtcaatgtttgaccttcatagctgacagccgctctatcaggcgtctttttcgcctgctgctcaaacaactcatgaaaagttatatatggatacgtttttcctgtggcgttccatgttttgagaatcatctgcttctctgcctcaggtaataaagaatactcttttaaaggctgagaaggattcaacatcgcctgctctgttacataaacaaaatggtcgaacatggcggatatagaagccgcatcaaacagcccagtattgtacttgatgttcagctccattttttcttctgtttcccacagttcaaatactaattcgtattcgccctcttggtgaatatactcaacgaaatcgacagaaaagaagtcagcatagcggctcagcaagctttgatagcttccggattgaagaaaattctgatagaaaaaagcggtttgaaataccggtgaacctgcttgactgcgaggaatattcagatccctcaccatttttggaaaaggatatgctgcatgatcaagcccatccaatatcgttaattgcaattttgatataaagctagaaaaagtgtctgccgggttcagctcactccgaatcgggagcatattgagaaaatgtccaatggcatcatcaaatctttcttccggcctcaccatggccggcatgccgacgatctgttctttttggcctgtgtaacggccaagcagcatcatatagcagcttaagaataccgtcgtgacatttacagaatgctctttcgcaaacgttctgacctgattcatgaagccgctggacaaccgcctggtgtatgtatcctctctaaactgagaatcgactgaacttgcgctgacattaggcagctgaagattcggcaaagttcccgatagctgtttctgccaatatgtacggtgcttcacaccgtctttgccggcaagcatgtttttctcccatgccgcaaaatcatgataaatggcaggagaaacagctttttccggctgctgtccttttaaaagaagctgataggtatcaaacagactgcgtataaatgtgacagacgaaactccgtcaaaaatcaaatggtgaatgacaactaataaaaaatgctcttgttcagatctggaaaagctcatgacacgcactaacgggctgttttcctttacatacggttcctttactttctttctaagaaaagcaggaatatcagactctttcaaacttgagatattttctgtcttgatttcaattgaaagtgctggctcatttttaagaaatggcactccgtctttctcttggatgacgtgctttaagattgggtgctgattcaatacaaggccgaaagcctgctggaatgtttcatggtgaagccctgacgaaaatttaaaacagagaggtacgtgatatgcacttttttcgggtgacattttttgcaatgtccataatcctttttgaacctcagagagaggctgaaaagttgcctgactcctttccggttcggttttatatgtgtccgtgccctttttgtcagcagacaagctgctgaggtcttcatgttctgatagatagctggctaagcgttcaattgtaggatattgatgtatctctctagctgttagtttgatatgatagtttttctcgatcgatcgaatgagcttcatcatcttgatagaattcacaccaagactttggatatttgcatttggctccacccaatcgtgggaaacgtgcagctcctcagtcaaacaggtgagcagatgcttctgtatttcttcccttactcttttcacctggtctgcttgctgtatcccctcatcctggactgcatcgttcatccgattgggtttatgtagcaagtggtcgaactctccattttcaaatgaagtttttagctgggtgcgctggatctttccgatagccgtttttggaatctcttctttttgtacaggcagcaaatattccggggtgactccgatcacctgtgagacatgggattgtatgtttctaagaagctgagacatctgctcatcatttaattttgcggaagtaacaaagaagatagccagctgatctgttgaattctggcccagacggacagcgcaagcagcagtataagaagtttcaatttcaggtaattcttcaactgcagactcaattgcatgactgtaataattaatgccgttaatgataattgcatctttcgtacggcctgttatggttaagcgcccgtttcgcaaaaagccaagatctccggtttcaaaccagccgtcttctgtaaacacactctcattcaaatcaggccgctggtaataaccgctagtaacagaaagacccgagacttgaaaacggccgatctcaccctcttcaaccaattcattatggtcattcacaattctcatagagaagccggggattggagagcctatttcaacaaaatgatcatcatcacttgttccagcccgggtaaattcatgagaaaaaataacgcccgatgaagtttcggacattccccaggcaggtcggatggcgtcagcaggcagtccatgtggttctaaaagctcaagtattctacgccctaccttggctaccattgcttcaccgccattgagcatgtatcgcattgaagacagatcccatttcttatcttttatttcttctgcaaaatcagtaaccagaccaaacgcaaaattcggcgcccacgtaacagaagctcggtaatgatcaatccaatccagccatttcaacggctccattaagatcgtttcgcttgagacgttaatttcctgacagccaagataaacatcccgcaaatgcagcattccgatccctccgacatggtcaaacggcatccagttaaacgtaatatcctctctggtgaagccttgcatttgaataatccctttcaccatgctcataatgttacgatgattaagcataactgctttgggcgttcccgtactgcctgaagtcagcaataaaagcgctaagtcttcaggactggattgatgccaatctgtgtccgcttcagcgctgagcagatcctctacaataattgccctgaacccttcaagcccttgttcttttgcccaatcgagcatttcctgatgcatcccccggtccgtaatcaccgctggcttatcaagaagcgtccatgcgtctttcagcttttgagtgccgctgctcgattcagcatacgttggcggaacggctaatggagccggaacaacccctgttaacacacacccccagaacgcagggagaagctgtgaattgtcaccaagctgcaaaatcacgctttgttttgctttcaggcctgattggcgaagccccttcgcaatgcgcaatccatcatcccataatcgtctgtatgattggtaaacttcagttccatccggctgcaaataaatgattccctttgtatccccaagctccgtcgccgttctgtataaaacttcaggtattgttgccggctgcttttcagatatatgtaaaggctccccatgactgacagaaggattagttaatatgcggatattatcattatttctcatcacgctgcctccatttcacctgcaaaatttatatatattttcagttaattaccatataaacctttgattctacttttgacttcttcatgatgaaatgttttctcatgcatcatcaattcctgttcaatgacgcgcggcagctgatcgcgaagcggggcaaccaaatgatctttcagtgtaaccagtgagtttctcggcttttccgccagttcttgcgccagctccactgcataatctaacacttctgcacggggcagcaccttaaaaggaacccctcttttttcaagatcagctccgcggtagctgcccgcattcaataatatttcctgggccaggctgaaacccagttttttaggaacgataaaggtagcgcccattccaggcgtaaatccgtatttcataaaattagccgtatacacgctttctctgctcagaatgacaatgtcagcaaagagccccatgacaaagccgcctccaattccatggccctgcattgccgcaataactggaatctcgcaatccagcgccagagaataaagattgtcatcagtgaacttggtcaatccctgttgaattcgaagcagtccttcttgcgttcctcctgaagcaaaataattatcatatcctgtcaaaatgaccgctttgtatttgggattctgccgtatgtattcaaacgcttgaattaaatcgtctgtaagttcttgtgaaaacgcgtttttatgagtgcgatcttgcatctttacctgaataatggcggattcaatttcgataagctctacaacagaatgcgtcatgatgtcctcctaacggttctgattgtcatttttaaacggttactgatcctcccatgggaattgtcctgtttcaacatacctgatgattcccatttggttttgaggatcagaaaacatgtcttgatttgcagttaaagcggtggctttcgcacgactgacttgatgatcaagtgagctcataaactgtttataatgtgcgattccttttttattcagcctccgcaaacgcaataaatgctttctcagcagcacgtcactttcagcatcaaaagcatctattaacccccattcactggcttcctgaacggaaatcggctttgtcataagcgtcatataatgcgctttctgccggccgatacggcggatcagaaacggtaaaacacaagcagggtacaggccgaatagcagctcagagagactgaatgacgccgtctgatcagcaatggcaatatctgtggcagatacaaatccaagaccgccggcattcacttttcccctgacatgcgaaatcgtgacataagggccggtctgcaatttcatccacaaatcatagagaggctcttgggagcttgcctgttttctgccccttttcatttcctgatagatttcttgaaaatccgctccgaaacaaaacacctcgggaagcccctctaaaacgacaaccgtcaccgttgatgtttcacattggtttaacacttgcaagcattcttctatcagcgtgtcattaatcgtattattcgcttcaggacggtgaaaggtaatatagcaaaccgatgcttgaaagcggacctttatcgtttgataggtcacgagatccacctgtacttccgatgaaactcagaaatttcttctaaaaacaagcgcggcttctcttgagtggactgcatgatgcccggtatcatctcaaagtccagctttacattgcgcgtcccaaaccgcaccatcccgctccccttaaacaatagctcatactcttccatggagagctgataccggcgatccaaatgcttctcaataccaaatgttcgctgacgctcctggccttgcggagttgtaattccgctgtaaaattcagaacagcagccggatccgtaggaaaaacagccaattcgtttaggcgtatcaaatctcccttggtctatcgtgctggccaatgccagaaacaaggctgcccccataatatttccaacccgttgacagtagtttaaacctggttttacccgagttaaaaaatccgtctcaatcccggatgttttcaccttcgctaccttacgcatcattgtccggtgcgcacctttcaccatcccgccaaagggcgtatggtaagcaagatattgaaacgtgtcctgataattggcacccggtacacgcttttgatattccagaaaagtctgttcgcagcaatccaaatatgacattaaagacagatcagaatctcccgcttcactgtcgggaatggggcggcacgtgtccatcacttcatagccgtaataaccatttgctccgggatctatttgaaacacctcgggattttcgccaactaaaacggccaccgctcccgctccggcgctcggttccgcataagaccaatcttcgcttaaagcgtctccgccctcagcgattaaaaaacgtgaaatatcactggcgataaccagtgctttggcacccggagaagtctgggataatataaaattcaccgccatctgaaatcccgctgtccctgaataacacgcctgtttaacctcaaacaaacggcagttgcggttgagacctaaatattcatggatatatgtacttaacgatttcccaaagtcgatcccggattcagagcaagtgatcagcaattcaatccggtccttctctgcttcagataaagcatcaataatcggcttagctgcattgactccgaaggtcacgggatcttcataaggcagtgctaccgctttttctttcattaataaattttcaaatctcgcagtatctaagtgtctgtatttggccagctccatgacatcaaggtatgccgttccgccaaagacattcatcgcttctattccggctgaaaccatttatgattcgcctccacatttctcaatgttttgtatacaaaccgcggtgttcattccgccaaaccccatgcttaagctcagcgcatttttgatgcggtatgaaatcgatttctcatttacccaatgaaaggaatcatcgattggatgatccaaattcctgctcggatgcagggcagattttttcatttgcagcaaaacagaaataatctctacgatgcccgccgcactaagcccgtgtccggttatcgattttgttgcattgatataagcatgggaaagccggcatgcacggagcgcctttaattctatttcatctccaataaaagagcctgttccatgaggattaatataatcaatatcttctggtaaaagcctggcacgctccagtgccttctggatgacatgaatctctccttctaatgaaggatcaggattccggtttccgtccagtttgattgaccagccagacaatgctgcataaggttttagacctcttcgtaaagccgtctcctttcgttctattaccaatgcaccgcacgattctccatagataaacccgtctctgttttgatcgaagggacggcacgcattttcaggttcatcagcatatttgtccgtccccatagcgcctaaagcccttagcgcctcgcattccatataagaaagatccattaaagcaccaagtgctatgcaagtatcaacttcgcctgacaggacttgctgaatcgcatgaatgactgctaactggccgctggccgaagctcctcccaccgtatatgctaatcccgtgatgccaaactgatctgtacatatcccgcaaagatcgctgtccatgaaagacagaccatacgccggagaaataaaaccggagcggtcttgatacctttcataaacttcaaagttttctctctgttgaaaatttgatccgccaacaaccagtccgatacgtgaggaatctgcatcgtccaattcagcctcctcccaagcctctgtgagagttaccaatgcagcgcggctggagaatgatgcttttcgcaacatttttttagagagtcggtcaggataagacaatgacgcaatttcggctccgataaaccggctgtctttttgtctgcctgaacgcttcatgacatcaaaggcatgtctgccggacagcagcgaggaagcaaagtcctctttcccttgaccgatagaggccgtaacgcctacaccggtcaccaccacctcaggcagattgcactttgtcataaagcacctcagctaattcaccgatgtttttcaccccggatagctcaatgcgagggatttttaacgataaatcctctagcaccatcgtgataatttcagctctgtctacagagtcagctcctagctcaactaactgatcttcaggctcaaatctgtgtccgtctaattcaggaagcacctcgcaaatattggtgattaatacttcaaagattctctgtttatccataatgcgctctctccttcaagggattattttaatgatttttataggtatattttcataatattcaaacttttatttttatgttgtctgtttcatgcgacggctgatacatcgattgcatccgttcatgaagcaatactgccgtttctgtcattaattttttcccgatttcatccacatggcggtttcgccaattttctaattgcgaccctttaacccattgattaaaggctcccagcgcgggaccgcagtgaatttgataatcgaccttcgaatgttcgcttccgctgattgccaattttgaactgtatctgaagtaccatcggaaaatcaaagccattttatgcttcgggttttgttcagccttctcaatgtctgccgcgggataatgcaatgcaatatctttatatatgtcttctatactgcgtttaaagtatttctcctcaagctgggccagcatctttgcatccagctcacgtatagacccataccgctgatacagttcatataacttgtttgcccgtgcgggaaagaacacgcctttctttagcacctgcactttactgcccgattcaaacatatcacctgcaggcgcataggctgtatcttgtacattcatctgctgaagcaaatcctttactttatcacttgttgccgcctcaaccgtacattgattgattgagcctgttagaataaaatcagcccctagcataaaagccgccatcgctgcctcaggtgttccaattcctccagctgcaccaactcttatttttttccggtattgatattttttcatcatttcatctcttaaagatgtcatcgccggcatcaggctgtatgccacaccgccatctgtatgaccgcctgaatcagcttctacacaaatatcgtcagccatcggaatgcaccgcaacaactcagcttcgttcatagtgattttattttctcctaaaagcttttgcagcatattctcaggcgcaggactcagaaatgattctgcaacttccggccgtgatatttttgctatgagacgatttgagcatataacgtcaccattttgatttcgtttcactccttttgcgcgataccttactaatacaggagtgacacttaaaaatgctgaagcctccacaatgctcacttgattcctcaataaaagatcgatcattttttcttctgattcagtatgtttcatattgtggaccagattgatgccgtaggcttgtccttttcctaattcaccttgtatagcatggatcgcatcttcaacctctttcaggctcagacctcctgtgccaaagaaccccatcattcccgctcttgacagctttactaccatttctttcgaagcaatgccgcggtacattcctcctgcaagataagcatatgtaagatgataatcttgtttaaattcagcacttcctaaagattctgccgtaatcccggcttgaacattgcgttgctcctttagatgcgcactgatcgcggggttctttttcggtatatatgtcaatggttcagcttcatttttaatccgatgaatgagaccggttaaaacagttccaggcccaatctctgcaaactccatttctcctcttcccatcagaaaacgaatgctgtccgtccatttcactgtgttgtccatttgttcagataatgtatcttttaatctgtcttgatggtatggctctgcgtagacattggagataaccgggatcgccaaaggtgcaaactggaatgagtcaatatattgcttaaatacctgtttggcttcattcatatatctggaatgaaaagctccgctcacatttaatggatgaaacagctttacatccttggtgttttcaaaaacagcccgagctttttcaatctcttttttcgggccagaaatcacaatttgctggggcgtattttcatttgccacatcaatgtcataaagacggtgctcttctaaaacggctgtaacttgttccttactcaggccgatcacagcagccattccgccccctgtaattcgtcccatcaattctcctctttttttgacgagccttaatccggtttcaaaatcaaatgcaccggctgccatcagcgcattgtattctcctaagctgtgtcctgccgcaaaatcaggttttctgccggtctcctccactctcttcaagtaactgagtgcattaacaacatacaaagccggctgcgtgtattcagtatgatttacatccagatatgatttttcggtacatagcttctctattgaatagcccaatatttgatctgcttgatctgtcaaatgctgatactgttcaaatagcccttgtcccatccccttttgctgggagccttgccctggaaagacatatgtaatcatcttgtaaacttcctttctggtgtacggaaatactcaaccgtattcagatttttcagctcctgatgaaatggtgttatgattgagcagcaacggtcagctgaatcacccggaatcagctgtttcacaaaagcagctaaggtgccggatggccctaaatcgataaacttgcatgtatgctggctttccaaatatcgaatcgcttcacgaaacatcattggctttctgaccgcattccaaaagaaattctcgtccattacgtgaaggcagcttcccgttaagctcgatacaatcggtattgacggtttttgaaaagattttgatcttaaaaattctgcataggcactctctgccggatcaataagcgaagaatgaaaggcataggacacaggaagcagctggcaaagaatctgcttctcctttaaatcctccataatcttccttatatgatcttcttcaccagaaatgacgaagtgcgaatcataattgatagaaatgagttcactatttccaaacagttgcggatgatcattcagcaattgcggtttgtcaagaatggccagcatttttcctttatcgcaggaattctggatgataatagcctgttcaagtatgcaatccagcatatcctctgcgtctgacacaccagaaactgccgctgctgcgaattctcccagacttgatcccaatacgtaatcaggataaattcccctgtcttccaaaaccttatataaggaatactcaatcataaaaatggcggggtgggaaaaaagaatactgtcaaacggatctgacacacgtttacctggatggtagatttcttcaacaatggatgtgccgattcgccgtgctgcaatggcatccatttcaagcattgattggcgaaacacggtattttccttaaatagttctttccccatgtgatagtattgggaaccttgcccggaaaacataaaaacaagcggttcattcatgtgtataaccttctttttttatatttatgacggctattggatttctcatttccatgcatgttgttaaagcacatagcagcgattgaaatgaaattaataaatggaaaagacatatgtgaaaaagtaaaggagattcaacttggaaggattgctattggtgctctggatgtggttcatttatgacgtgatcgtagatgtatgttgatatctcaaaattgatgtaacatgataacaggatcagcaaagaacatcgactctatgattggtgggtgcggtttaaaaatggaccatctagatgtgggagcgatggtttgacagaccggctgacatagttcaaatgtctaacttaatttatcagcctctttatgtaacagtatataaagttattcaattagaaacagtgtcaatcgaacgattgaatctttaaaactttataccttaaatgaaaggaaatctgtgtttagacctgattgatgagatacatggccataggggcaaatgctttagcggggcattgcttccgcatctttctttatgcgatgaattaacccagttaaaacatttccaggccctacctcctcaaactccatatggccttttttcattaagtagcttatgctgtcagtccatttcactgaatgattaatttgatcagccagcgtctgtttcatgaattcgtatgtatacggtttggcatacacattagaaataaccgggatagacggaggcgaaaaataaaaggcatgaaggaactcctcgaattcttcttttgctttattcatgtatctggaatgaaacgcgccgcttacgtttaaggggagtaccattgtaacttcagtcatcgtttcaaaaagagatgcggctttttcaatctcatctttttttcctgaaattacaatttgatatggggcattcacattagcgatatcaacatcatgtaaatgatattctttcagagcctttgcaacctgctcttcatttagtcccataacagctgccataccgccgttgcttatcagactcatcagctcgcctctttttctgacaagctgtaaacctgtctcaaaatcaaaggcttcagctgcaaataacgcattgtattcacccaagctgtgcccggcgacaaagtcaggtttaacttcttcatccctgatttttttcagatagcttagtgcgtttaccacatataatgccggctgagtaaattgcgttttgtttaaattggaataaggattttccaggcaaagacgtttgatagaatatcctaagatctcatctgcctgatccgtcagttctttaaattcatcgaataggccgctgcccattccctgtttttgtgaaccctgacctggaaaaacatatgtgatcattctctcaaagccacccttccgattagtagatgtgtttcacttctgtatgattttataatagtgatgaccggataaatagtagcatgttcatgttgatggtaacctctgtaaatattatccgtcaagttaatttttcctacagtttgctccattgtttttctgcttttttccattgaggaataaaggatcaggagatataacagaacataagaaaaaagacccggattacatatagggcgccatatcatgataatgcgcttcattttctttcaaatgagttttcaaaataaataacaccttctatgtaatcattttcgaaaataaaaatcatttagatattcgaagaaaaataggataatagattcagaaggattatttaaaatcaaaaatacctttttggtttttacgagtgcgaaatttcacaaaatattctttcttatcaatttgaaagtaaatattatgctgataaagatcctttatcgaatggccgggcgatttgccaaatgagtgaccaggatacacccgtacatggggtgaaacctccgactttattctttgaatgctatcaaacatctcttccgcagagctgccatcatcctcacatatgccgcacccttctgtaaacaccgtatctccggtaaaaatactctcagaaaacaaataacacattccgccggctgtatgccccggtgtgagaaggcactgtgctcttgtgtttcctatgctgatcgtctgatgatcatctaggctaattaaatttctgcatcggaattgataataatcaatttcttttttcgacatataaacttgagcgttaaacatcttcgtcagcgggtctaccagatttacatgatcataatgagagtgtgtcaatgcgactgcctttaattccgcttcgagttcggaaagtgtagtggttatcttactcaattcccatgagggatcaacaacaattgcagatctgcttacaatatcttcaatgatatagcaataattcgtccagccctgataccttgttttaattggatgcaccttgtaagtaagattcatttataccatccctatcatgtaaagttcttaaacgatggaccagtgttcacccctcagtccgtctttcattccactttaccaaacagcatgattgttttccatttttttcagagatccttgttctttgaaaataaaaaagcgactcttttggacgcatgcccaacaagaatcgcttttcacactagtgccttaaggatgtcgtttttgtgtctcacgtgtatcttccacgcaaattgactctacatgctgcataatgacccgcttgattcggtctttattcacgcgcacagggtcaagcatggcatgtaaagccaagccgtcaacaagcgcgtaaagtctctcagcttcaatgtctttatcagcattctgcttcagtaaatcggattcatctaaataggcaatcagattccgcatgccgctgaaaatcccgtcatgactcgcatcaaacatatcctttttatgtctggcgtaagcagtaaaagcaaaccaaacctccatctctctaatcgtttcttcattcgttgggaccatttcaagcaaaatttgcaacactttttccttagggagcaaatccctcactgcaatgtccttaattcggtccgttaccttttcttggacaagtttcattgcaaaagcaagcaattcatcctgtgtagagaaataatggcgcagcgcacctaatgacaatcctgcttcctttgcaatatttctggctgatgctccctccatccctcgttctaaaatgacgcgccacgttgcttctgcaatttgttttcttcttttctcatggtcaatttgttttggcatagctttattgtaacaagaaaaaaatgagagggcaatttttataatacagttgtgttacaaaaacaaagatggtaacatattatttaaataatacaactgtattgaaaagaggggaatggattgaacggtatcgcatggatgattgttttctgtgaaattgcgttttgggttgtcattgttttggggcttgctgtacgctacgtattcaaacgacatacattaggactgctattccttgccttaactccagttatcgatttgatcttgttagcggcaactggtgtggacctttaccgcggagcctcagcgaccgcagcccatgggattgcagctgtttacatcggtatatcgatcgcttatgggaaacaaatgattcaatgggcagatgaaaagtttcaatattatgtgacaaaaaaaggaacaaaaccgctgaaacgttttggaatggaccatgccaagcacggtgcgaaaggctggctaagacatgtgctggcctacttaattggtgcgggactattggcagggatgatctattttatcaatgactcttcccgaaccgaggcgttgagcggcattcttaaactgtggactgtcattataggcattgactttctcattacagccagctattttatttggccaaaaaaagagaaagcttcggcgaatctcaggagttaacatgatgaaaaaggcccttccccagtggaaagggccttttttggttttgttaaaatatgctatactattttcgtcagaaaacagacttatagatattttgggctgattcaagggtgctgtttgtatgagtaagcaggtgaagggagtgtcatacatgaaccaaaaagaacagaacgagcactctaaagattttaacctgagatcaaaattaatcggaattgtatctattacttttatcgcggccatcgcgcttgcagtcatcttcggcggctttttcttcgggatgaaaggcttattctccatacttggcatcacatacgcttccaatcaaacattagctttatttattttagcctgctttgctgtaggtttaatcatagacccactcacaaagattatctctatcattttggcaaaatcactttcattgaaaaagactgcactttttgcttttatactgtattttatcagcaatcttataacgatctgttttgcagattactttatgcagtctatttatattccagatgtcttgcttgttgtgatatcagctttcatggctatcattgaacttgcttttgataaccagcctaatagagaagcagcttaaagccgatggcagatatggaaaattcataacaccctatatttggacatcaccagttatataaacgaaaaaatctccctgttcacacgaacagggagcaaaacacaatgttgtaatttaaattctgcattctaaaatgattctcacatttggatcatcaagttcatccaaaaagataatgatcttcggaccacatgccatatgtttccaccccctcacccaaaatatacattaatcccaattgcctgtaaatggaaattttgttatacggaggaaccatgaagtataatgcgttaacactgctcacacgtttacaaccgtttcttataatctgacactcgaaggagtacaaaaaaagcattgatccattcagagaatggatcaatgcctaccacccccgctacatcacgcgtttgaacatcttttccatctcatatgtcgagtggtgaatgatgatcgggcggccgtgcgggcatgtaaatgggtctgatgtgcttcggaggtcgtccagaagcgctttgatttcgtcgtttctgaggtggcgatttgctttgatggagcctttgcagctcatcataatcgccgcttcctcgcgaagttttttaatatctatatttttggagtcgagcacctgctgaatgatttcttctataagctctgcttcttctccctttggaaaccaggctgggtggcagcggacgatgtaactgttagagccgaatgactctaaaaagacaccgacgctttcgagctcttgtttgtgctgttcaataatcaaagcctcatttgtggagtagtggaacgtcagcggtacaatcatctcctgcacctcaggctcaacctcccccaccttttcacggaagtactcatatttaatacgttcttgggcggcgtgctggtcgataatatataggccgttttcgttttgtgccaatatataagtcccgtgcatctggccaatcgggtacataattggaacccgatcagacgctggctgcggctgttcctcatggcattcctgctcaaatgtttcaggctgttctgctgaaacatcggacacctcaagggtttgttcctgatcaacgataggaggagcatcaaattggagagggggcaatttttcctccgcatcaaccggctcttttacgactgagctgagcttcatcggtgaataagatggcgcagtcgatttttccggaacttttttttccggaggcttttcatcaaaggttataaactgctgctcatttttgatggcaggtgctgattttttcgggacctgggcactaggaatcagctgctgctgtttaaacacatctttaattccgtcacgtattaagtcatgaagctctgtttccttgctgagccggacctcaagcttcgatggatgcacgttgacatcgactaaaatcgggtccatcgtaatttctataaaagtaatcggatggcgtccgatcggcagaagcgtatgatagccttcatgaaccgctttgacgagcgggaaatttttaatgtaacggccattgaccacagacgacatatagtttctcgacgcccgtgtaatctctgggagggcgatatatccctttacttcaaaatccaaggagctcacatgcagcggaagcatttttttggcgacagccgtgccgtaaatcgctgccagtacatggcgcacatctccgtttccgttcgtttgaagcaggtttttcccatgatggcgcaggcggatcgatacctctggatgcgccagagcaatacggttaaccacatctgtaatgtttccaagctctgtatgaacggttttcatatatttcaaacgggccggtgtgttaaaaaacaggttggaaacgacaatttcagttcccttcctgcttgaggaacgcgattcggaaatgatgtttcctccttggaggacgagcttcgtcccagctccttcaccagtgcttgttgtaatctccagatgagagactgacgcgatactcggcagggcttctcccctgaaaccgagcgttctcaccctgaataaatcattttcatcttttattttactcgttgcgtggcgccggaaagctcgcttgcaatcttcattctccattccttcgccgttatccaagacccgaatggatgcaaggcctgcttcctcaatatcgatttcaatgactgtgctgtcagcgtcgatcgcattttccaccaattctttgacgactgaggcgggccgttccacaacctcgcccgccgctattttatttgaaagctcatctgacagttggatgacttttgccacattcatcaccccgttttaatgtaatttcttttgcagcttgtacatttcattcatcgcttcaagcggtgtcatatccagtatattaagtgatttgaaagcatcgatcacttgcttttctttttttgaaagctttggtgtttcagccggcttttccgcttcgtcaaaaaaggacagctgtgccggctcttctttcacctgaggtttctgcaccggcacttccggtttgtttcctgaatgctcaagctcttttaaaatatcttgagcgcgcgcaatcagatctcccggcagttcggcaagctgagctacatggataccatagcttttatcagccgcaccttctttaatttgatgaagaaagacaaccgttccgttatattcttcagcgcgaacatgaacgtttttcagctggggcagcttgtcctcaagaacggtcagctcgtgatagtgtgtgctgaacagcgtcttggcgccgatatgatcgtgaacatattcaataatcgcctgtgccagcgccatgccgtcataagtggacgttccccgcccgatttcatcaaacagaatgaggctgtttttcgtcgcattgacaatcgcatttttcgcttcaagcatttctaccataaatgtactttgtccggaaatcaaatcatctgcagcgccgattcgcgtaaaaatttgatcgaaaatcgggagcaccgcttttttcgcgggtacaaagcagccgatttgcgccataatggaaatgagcgcgatttgtctcatatacgtgcttttccctgacatgtttggacctgtaatgagaagcatttgtctgttatcgcccatcatacagttgttcgggacatattcctggctgtccatgactttttcaacaaccgggtgtctgccttcaatcacttcgacttcatctttagagaactctggtttcgtgtagtggcgattttcactgattgtcgcaaagcattgcagtgcgtccagctcgctcatctgttttgcaagctgctgcagccgcggaatatactgcttcactttctcgcgcagctcggtaaacagctcgtactccagctcacagatgttattttccgcctctaaaatgagcgcttctttttcttttaattcaggtgtaatgtagcgctctgcattggttaacgtctgcttccgctcataacgcccttcctcaagcaaatgcaagtttgcttttgtcacttcaatgtaataaccgaaaactttattaaagccgacctttaaagagcgaatgcctgtgtattcccgctcctgctgttccaggcgggcaatccagtcttttccgtttctgcttgcatcacgatattcatcaagcttttgattataaccatctttaatcaggttcccttcttttaccgataaaggagggttttcgtacagcgcttcttccagcagttcaagtacatccccgcaagggtcaatgcgctttgcacgttccttggccttgtcatgagccagtgaagcaaccagctgtttgatgccaggcacttgctttaacgattccttcagctgaatcaaatcccgggcattgacatttccgaatgcaacgcggccggcaaggcgttctaagtcatatacttcttttaaacgttcacgcagatcttcccgttcaaagaaatgggacattaatgtttccaccatttcttggcgctcttcgatttgattgactctgataagcggccggtcaatccactgtttaagtagccggcctcccattgccgtttttgtttcatccagcagccacaaaagggagccttttttatttttcgaacgaatcgtttcggtcagctccagattacgctttgagtacaagtcaattttcatcgcttcctcaagctcatacacctgcacgggctgaagatgatcaaggctgcgcttttgggttcttttcaaatacgtatataagcgcagaaatgtttttgttatatcttcattatttaagtgctcaatgatcgttacgtgttcgtctgtttctccgtcttcaattgaaatcgttgcaccgcaccgctctctcagctgtgccactgtatcggcatccaagcttcctgaaaccacgatttcccgtgcgccgactgaataaatttctgatatgacgtcttcaagccgttcaatcaaaacagccaaattttctcccgttgttaaatcagacagagcaagtccgtatccgttcgagcaggctgaaacagatgcgataaaattattttccgactcatggatgcctttgccgtccattacagttccgggcgtaatcagctgaactacttctcttttcacaacgccctttgcggctttcggatcttccgtctgttcacagatcgccactttgtatccttttttaataagctgttcgatatacgcggaagcagaatgatacggcacaccgcacatcggtattttttcagccgcaccgccgtctctgctcgttaacgtaatttccagctcttgtgacgcttttttggcgtcctcaaaaaacatttcataaaaatcacccaggcgaaaaaataaaaaggcatcctggtgctctgcctttatttttaaatattgctgtatcataggcgtataaccggccattgtttaatccctcactatgtatcaacgtttctattttccaaccttcattataacataaacaaaaagtgataaaagaatgatatatcaatataaaaaagagacttgggggtactgtctcccctagtcccttttttattcttcaggatctcccactaaaaactccgggttgatgtcttcaagctcttcatcaagctcatcttcccaatcttcctcgtcatcctcttcccagtcaggattgacctcaacaactacctttgtttcccctaccacttccgccaaaaattctctttctgcctgcacaacgattttatttccattcggcgaaatggtcacttcaaggcagtttggctgctgaagcactttggcaatcacttcatgctcatcatctaagtaattattgtctctgtatctgagtttaatgacatctacatattttacccgttctgtgacaacctctgtctttgtgttgtccgcgtaagagtaccatacgtttatatcataatacccttcaatttctaccgtttttccaattttttcagcgtcatacttgtggttaataatccaaccacccaaaatgctgctcggttttttctcaggcgagatggtgttggtgcattgggtgaattttcggcctttcgctactactgccttcgtaataatttccctgtattcagacattccggcatgcctccttgttcttcttcgtgttatcttatgctgggcatttgtctagtgtgcatttttataaataaaatataaaaatacaaagtttctgttccattgtatgcaggggtgcctagaaactttacttataagtgcgataaagtttatacgcggctgagcacagaaaaaccaattgaacatttggtacatagattatttagttcatttttaaccgcacaaatgataaaaaaacacgggcctgtaaaggcaccgtgtttagagagaacagctgttatttgaatgcttcacctttgaaccggtttcccctttcagcaggtcgcctccggttgatgtgatgatttcatttgtgacttggttggaaatggtgtgtgcaacgagctgcagtaggtcatttacttccatttgcgagtctctgaattcctggataacaggaatctcttcaagctcttcttgcagcgcgtcaatttttgcttctacttgtttgagcgcttcatgcttttcataatgcttcagattgacagcctgcttttgcagggctttaatctgattaacgattgtggacactttgtcattctcattgatttgcgcttcagcccgtttgaaaaaatcaacctcttctgtttcagaaatcatttttgcaaggtttcgagcctgctgcacaatgtctttttttgagtagagcgtcatctcatttcacctcgattgcttctcctaccatttctccgtcaagcgaccatgttttcgcttgctggattttcacgcggacgattttgccgatggcttccttcggccctttgaaattgacaagcttgcttttttcagtatagccagcaagaatatcagggttatttttgctttcaccctcaactaatacttcgacaaccttgccttcgtattccttcatttttttagcagaaatttcattcaccagtgcgtttagacgctgcaggcgttcttttttcacacgcatcggtacattatctttcatcttagcagccggagtgccttcacgcggagagtaaatgaacgtataggcgctgtcaaactccacttcacggtatagagaaagcgtttcttcaaactgttcgtccgtttcatttggaaatccgacgataatgtccgttgtcaaagaagcgtttggcattgcttctttaatttttcgcaccagctccatgtaacgctctctgtcatatttgcgggccatcagcttgagaacttctgagcttcctgattgaaccggaagatgaatgtgatcaagcagatttccgccttttgccagcacttcaatgaggcggtcgtcaaagtcgcgcggatgactcgttgtaaaacggattctcgggatatcgatttttctcagttcatccatcaaatcaccaagtccgtacgtcatatcttcaaagtcttttccatacgcgtttacgttttggcctaacagagtaatttccttatagccttcacttgcgagccttctcacttcctgaatgatatcctcagggcggcggcttctttcttttccgcgtgtgtaaggcacaatgcaatacgtacagaatttgtcacagccgtacatgatattgacccagcccttaatttttccatttcggacttttggaaggttttcaataacgtccccttccttagaccaaacttctacaaccatttcttttgaaaggtatgcttctgacaaaagctccggcaggcgatgaatgttatgcgttccgaaaatcatatcgacaaacggatgttttttcaaaatacggttcacgactgattcctcttgggacatacagccgcacacgcctaaaatcagatcgggattgttttttttcagtgcttttaagtgcccgagctcaccaaacaccttgttttcagcattttcacggattgcacatgtatttaacaaaatgacattggcatcgtcaacagagtttgtcgcttcgtaaccgagcgccataaagatccctgccataacctctgtatcgtgttcattcatttggcagccgtacgtacggatatagaactttcttccgtctcccaatcctttaaattgttcagaaattttaaagtcattatgataagtaacggcttccttgcctcgttttttcgcgtcttttaaagaaggcggaatgtaaacagcttcaaagtacttgctgtaatccttctcggattttttgtccgatggatgaacttgtccgctctctaatttttgtttttcattcatgtcatattttctcctttcaaaccaaacttccacccttcagtataaaggttattgaagctctgcacaactggcaacctatcattgtacactcattgagaataataatcaataaggaatcaaaagaggaagagtaaactcttcctcttgttacaatagctggagctcctttgccgtcttttcgatgacatcaagcgcctgatccagttcatctttggtgtgctctgctgttataatcgtgcgaattctggcttttccctttgctacagtcgggaaaacgatactttgggcaaaaacaccgcgagaaaggagctgatctgaaaattgctttgccacaccttcatcacctattaaaataggaagaatcggcgtttcactcttcgtgagagtcagacccattttcacaagcattgctttaaaataggcagtattctcccacaagcgctccatatgctccggctcttcaagcaagacatcaatcgcttccatacaagctgcagtgactgccggcggatgagatgtgctgaataaaaatggacggcctttatggcgcaaataatcgatcagcacctttgaacctgcagcgtagccgccgagcactccgattgccttgcttaatgttccgacctgaatatgcactctgccgtcaagaccgaagtgattcaccgttcccctgccgttttcgccaagtactccggatgcatgggcgtcatccaccatcacaaatgcgtcatatttctcagcgagctctacaatatcaggcagaggagctatgttgccatccatggaaaatacgccgtctgtcacaatcagacgcatccgataattcattgactttctcagcacccgctctaaatcactcatattgacgtgctgatacacctttttatccgcctttgtcagtcgaattccgtcaataatagaggcatggttcaattcatctgagatgacaatgtcctcttttgatagaatacttgaaagtacgccttggtttgttgtgaagcctgattggaatacaagtgccgcctccgtttttttaaaggctgccagctttttctcaagctcttgatgcattgtaaatgtacccgcaatcgttctcactgatccggtgccggctccatactgctgaacggcctcctgtgcggcgttgatgagtctaggatgtgaagtgaatccgaggtaattattagaagatagctgaatgactttttggtgattcactgtgacagatgggccctgcatagattcaagctgttttatgtcttgccatgtatggttttctttcatactattaagctctgcttttaaaaactcaaattccttcgtcatgtttatccccctttatggaattaaaattacttttccgcactgcccgcttctcatcagttcgaaacctttttcaaactcctctaatggaaactgatgggtaataacaggtgcaagatcgatcatgtttgaactgatcaactgagacacctggcgccatgttgaaaacatttttcttcctgtgattccttggatggtaagccctttaaataccactttattcgtcaaatcaattgtcaccggatgttccggcaagctgagaatatgaaatcttccgccattcgcagccatcgcaagaccttgggcaatcgctgagggatggcccgacatctcacaaacaagatctgctccttctccactcgttaaagcgcttacaattttgagcgggtcttctttttcaatagaaacagtacaagtcgctcccatttgttttgcaagcctcagcctgtattcattcttatcaatcgctatcacctgagaagctcctgctgcttttgcaaccgcaacagccataagaccaatcggtccgcatccaatgactgcagtcgttcctcctgcaggctggctctcgagtacggtatgaactgcatttcctaaaggctcttgaatggaagcaatcgacgggtccatatcagcgggatttctccaaatgttatcagctggaacttttacatactccgcaaaacagcctgccgtgtccactccgattatagcagtattggtacacacatgagattttcctgttaggcaagggacacattcaccacagacaatgtgtgtttccgcagacacatactctcccacttttacactgctgacattctctcccacgccctctacgatgccgctgaactcatggccgaaaacatagggtgttttgattctctgacgtgcccattgatcccaattataaatgtggacatccgtgccgcatatggaagcggctttcacttttatgaggacttcatgtttatcaatctcaggaatgggaacttcagtcagcacagcaccgaacgccccgtcctttttcattagagctttcatctttccactctgcatgtacaatcctccttgaaaaattcttgttatattcggattgtaccatgatatggaataagcgtaaacagaactgtcttttccagaaggacaaaagtatctgtcttgaaaaatgggcggaaattttttttgaaacgttttagctcatttctgattttgtatattcgctcatttatgtgctaaaaatactatcgggagaaaatatcacaataaatgaaaaacaacctgtttgcattacgcaaacaggttgagaatgctttatttgtttttagcgaggctccacgattaatttaatcgctgttctttcttccccatcgatttgaatatctgtaaaagccggaatacaaatcaaatcaacgccgcttggcgccacaaatcccctggcaatcgccacagcttttacagcctggtttaatgcacccgctccgatcgcttgaatctcggcggctcctcgctctctcaacacgcctgcaagcgcacctgccactgaatttggactcgattttgctgaaacttttaagatttccatttctgctcccccttagttttacaatggataagtgagtgttcattagaacaatcattattagatgttgctatccaaaaagccatccccacaatgcttttcaaaaatagcgggctaccttccatttttactatattcactaaggagttgctatattcctgcttttctttttaatatttttataaaataaccatatgttcaactattcaaagaacatgtgatcatcgttgattaaaatacgctcaattttcacggcttttttcgtttgatcgtcaatgtcaatgacaactccgctgagcgttgtttttccttcagcgacagtaaaccggactggaaggttcgttttgaatcgcttaataatcgtctctctgtccatccccagtataccgtcatacgggccagtcattcccacatcagtaatatatgccgttcccttcggcaaaatgcggttatccgctgtttgcacgtgtgtatgagttcctactacagccgatgcccgtccatccgtgtaccagccaagtgcgagcttttcacttgtcgcttcggcatgaaagtcaataaaaatgtacggtgttcttttcgcagcttctgcgatcaattcatccgcttttaaaaacgggtcatcaagcggcggcaaaaacgtacgtccctgcaaattaatgactgctagttctttgccgtttgctttcacatatgtgatccctttccccggtgttccttcaggaaagtttgccgggcgaaccaagttcggaacgtcatctataaaatcaaatatttcttttttgtcccatgtgtggttccccattgtgattgcatctgcgccggactggattaagctgtgataaattttttccgtcaggccttttccatgtgcggcgttttcaccattaataatggtaaagtgaggcttatattttgtttttagctttggtacatattctttgaccatgtcacggcccggtgaaccgacaacatctccgataaataaaattctcattttgtaaatcctttcttcttgaaaattccttgccgtcaaaaaaataaagtgatgcttagcgcatcactttattttgcatactctacggctcgagtctctctgattactgtcaccttaatatgacctggataatcgagctcgtcctcaattcgcttgcggatatctcgcgccagtcgatgagcctcaagatcattaattgaatccggcttcaccataattcgcacttcgcgtccagcctgaatggcaaatgatttttcaacaccttcgtaggactcagaaatttcttcaagtttttcaagtcttcgaatataattctcgagcgtctcacttcttgcgccaggtcttgcagcggaaagcgcatctgctgcagctaccagtacagcaataatggaagtcggctcctcgtccccgtggtgtgatgcaatactgttaatcacgactgggtgctctttatatttggtcgcaagctctaccccgatctcaacgtggcttccttctacttcatggtcaattgctttcccgatgtcgtgaagaagacccgcacgtttagcaagctttgcgtcttcaccaagctccgatgccattagaccggccaagaatgcgacttccatggaatgcttaagcacattttgaccgtagcttgtacggaactttaagcggccgaggatcttgatgagatctgggtggaggccatgaacgccaacctcaaatgtcgtttgctcacccatctcacgaatatagtcatcgacctcgcggcgagatttttcaaccatttcttcaatccgtgccggatgaatacggccatcctgaacgagtttatcaagagcaattctggctgtctcacgtctgatcggatcaaatccggaaagaatgacagcttcaggcgtatcatcaataatcaggtcaattcctgtcagcgtttcaagcgtacgaatgttacgcccttcccgtccgatgatacgtcctttcatctcatcatttggaagattgacaactgataccgttgtttcggcaacgtggtccgctgcgcagcgctgtaaggcgagtgaaagaatgtttttcgctttcttatccgcctcttctttcgcacggttttcagtttcttttgtcatgatggcgatgtcatgtgaaagctcgttttcaacccgctcaagaatgatttgtttcgcttcgtcacgagtcagactcgaaattcgttccaactcagactgctgcatacgaatcatctcatccactttgctttccatctcttcaatatgttgttgtcgttcattcagagaatgatctttcttctccaacatcgcttcccgtttatcaattccctcatgtttgcgatcaaggttttcctccttttggagtaaacggttttcttgtttttgaagctcatttcgtctttcacgaacttcctgttcagcatctattcgaagtttgtggatttcatcctttgcttcaagcagagcttcttttttcagtgcttcagcatcacgcttcgcatcttcaagaatttgctcggctgcaccgcgtgcgcccgcaattttcgcttcggcaatggttttacgaacaaagtagccaacaactaaaccgagtagaatcagcaaaatggagatgagaaccatcataattggggtcatactttcacctcctcttgctatgaacttggttgttgcttaaaaagtgtcggcatgtacattgtctagttttctcaacatacagaaccttcacagggaatgagtgtgttcatcgcccttgtcaagtttaaatggtttaacaatcatgttaaaaaaacaaatgttacaacttcattgtaaatgtgtcggaaatacttgtcaagcttgccatcttaacgtttgcaggccagtcttcttttcacgtgccgaatgcaattcatccaaaagaagatcgccaatcattcttgatttagaagctggtatattttattgttcacttggcccaatttagcattattttgaatgtttgagaacaaaataacaatggtttgcccagatttgctaaagctgttcaagatattgaagcccggcataacaccatggtttgaatagcttccgggagcaacataaaatcccatgccgtatgtggagctgctccctggcgtaaacatcttttcatagcttttttgcgaatacagttttccgtctatcagcgcttggtcaaatttgtacatatctatagcgctcatataaatatcacccgctccatacagctgggataaatcaggtatatacggtgtaactgttttgctgccctccatcttatacccgacggcaggataaggttctttttcatatgttttgtaaaagcctgcatgcgtcattcccgcaggtttaaaaatatgattctttatgtactgttcatagggctcaccgcttacttcagcaataatataagcaagaacagaatagttggaatccttgtagtcccatacgcccggctgacgtttgattccctgaagttctatatcttttattaaatcgtccggagtaatggcgccgtttccttcaatatgtccgtttatccccgatgtatgtgtaagcagattcttcaaagtaatcgtttgtccgttgggaaaatgaggtaaatacgtgcttaccggatcacttgtctgaagtttccccttttcctcaagctgcaaaatagcagttgcaatcagcgctttttgtgatgaaccgacataaaaagatgtcaatggattattttgaatgtagtgtttacggtcagcatagccaaaacctttatttgttacgatttctccatttctgacaatcatggctgttccgctgaaaccgatctcttttaaataattgctgattttttggtttcgatccactgttttgatttgttcctctgattttttggcagttttctttttgacctcttttttctgatcggtatttgaaaccgctgcagtttcttgagatggttcgttttcttcactatttcgatgaagagcattccaaatcgtaatgcaaaccatcactgctaaaagaccaaacaacagttttcctcttttatttagttttctccgtctgcgtttcgcagttcttctgcgggttgggcttgtcattcattttttcctcccaaaataaattccattttgcacacgttttgttagacgaataaagccctaaaaaagttgtcaaaaaaagcaatatttttatcatttttttgcaaaatacaaaaaagctgagtttttcactcagccttttgtatcatttgaaacttattttatttttattcttcaaattcgagttcttcttgtgtctcttcagcttgctgctgcactactccgttattatccaagccgtaatgttcgcgaatttgctcctggatcatcagcatgatatctttattttctttcaggaattgttttgcattttcacggccttggccaagacgctcttcttcataagagtaccatgaaccgcttttttgcacgatatcaagttcagttcctagatcaatgatttcgccttcttttgaaatgccttctccgtacataatgtcaacctcggctgtacggaacggcggagccaccttgtttttcacgactttgattttcgttttgttccccattacgtcgttgccttgtttcagctgttcagcacggcgcacttcaagacgcacggaagaatagaatttcaacgcacggccgccaggtgttgtttccgggttcccgaacataacaccgactttttcacgaatttggttaatgaaaatcgcgattgtcttcgatttgttaatggcccctgaaagcttacgaagcgcttgagacattaagcgtgcttgtaaaccgacatgcgaatctcccatgtcgccttcaatttccgctttcggaacgagagcggctacagagtcgacaacgacaatgtcaactgccccgcttcgaaccaatgcttccgcaatttcaagcgcctgctcgcctgtgtcaggctgagacagtaaaagctcttcgatgttaacaccgagcttttgcgcgtataccggatctaacgcatgctccgcatcgataaacgcggcttgtccgccctgctgctgaacttcagcaatcgcatgaagcgccacagttgttttacctgagctttcaggaccgtatacttcaataatccgtccgcgaggatatccgccaattcccagtgctgtatcaagagcgagggagccgcttggtacagtagaaattcttgtatctgtcttttctcccagtttcataatggaacctttgccgaactgtttttctatttgtttaagagccatatctaaggctgcctgacgatcactcattctattttttcctcctttatgttaccactacatatactataccctgtttgaagggatttgccaagaaaaaagcgaacgcatattcggattttttcttggcgtgattcctatcaaaatatcataatgtatcagagaaatcatgttttcttaggaggataatgtgctgaaaatattatttttgctctaaaagctttaagattaaatggcagccgtatttagcgccgcgttttctgatccccgttctggagcccgcaaagtgaaactcgtgaacctcttctttaccatttgcggaaatgccgataaacacatgcccaggctcatgcccttcttgagcatcaggtcctgctacaccagtaaagctaatgccgatatcgctgccagtgagtttttgaacacccttagccagttcggatgcgcactccttgctgaccgccccaaaacgatctaatgtttccttcttgacaccaagcacattctgcttcacgtcgtttgtatagcaaacaacgcccccggcaaataattttgaggcaccgctatgatccgtcagccattcagaaaacagccctccggtaaagctttctgccgcagaaattgttatgcctttttccttacatgctatagatagctcttttacaagagaagtatcatcgtaaccatagaaaaattcaccgacacgctctaagataacggcctctgtttcttttaacagacgctctgtttccttttcatcggcgtgtttggctgtcagacgcagcgtcacctctccatcagccgccaaaggcgcaattgtcggattggtttgtgcatcaataatatcttccaaatcggcttcaagctgagattcaccgataccgaaaaagcgaagaacagttgacacaattttttcatttgaacccatctttttcagcagaagaggctttgcctcgttttcaaacattggacgcaattcgctcggcggtccaggaagaagcatataatagcgcgattcatgctctgtgagcattcccggggccattccaaagtgattcgccagcacgtcagagccttcgatcacaagcgcctgttttcggttattaggtgacatcgtgcgttttgttcgtttgaaatagtcctcaatggattggaatgcctcatcatttaacacaagcggacgtcccagcgtatttgcaatcgtttctttcgtcagatcatcttttgtgggtccaagccctcctgaaaaaataatgaagtcagagcgttcttcagcaatgcggatgacctgcttcagccgctccgggttatctccgaccgctgtatgataaaatacgttgaccccgatttcagcgagctgtttgctgataaattgagcatttgtattggcgatttgaccaagcagcaactctgaaccgactgcaattatttctgctttttttggaaattccatgacgaagtccttctttcttagttagatgtttttaacgcttcccaatttttagagaaatattcccagcctgagacgacagtaaagaagacggctacccacagcgccaagtctgcaaacgggaatgacacaagttcaaatggaagattatgaagaagcaatgcagataccgcaataatctgtgcccaggttttgattttaccaagcatgttagcagctacgacttctcctgttccggctaagacaagccttaaacctgtcacggcaaactccctgctgataatcacaatgaccatccaagctggagcgagatcaaattgaacaaggataattaacgctgcggatacgagcagtttgtccgcaagcggatcaagaaatttcccgaagtttgttacgagatttaattttcgggcataatacccgtccacccagtctgttgtagatgcaataataaatagaatggcccccgccaaatgtgcgaccgggatggattcgtctccaacttcgagcctgccccagtcaaacggcgccagcatgataatcatgaagattgggattaatgcgattctagctagtgtgattttatttggtaagttaaacataaagcccctccaatttcatactcggacgtgaagaaaagtcatctggtaattaagatgacttttcttcctttttatttacaatctttatggtttgtgccatcacttttttcggatcaagttcatatgaaagaaccttaccgttgatttttattttcagattaggtgcatatccggtgcggatatcaacttgtttctgatcagttatgtcttttttataggtttcgtcttttttcagcgttccttcttttaaagagctgctgttttcatcgcgcactctaatccaggagctgtctgatgccttcagttccagctcgattttatcagcgccggacacttcataagtcgttaacgatccttcagtgccagcagctttaatctccagcttctcactgtcattttcttttttcttatcttcgttttctttcgtttcttttttagtgtctgtctctttttcagagctgttattttgattctctttcagcgttgaatctttagggatttcgtacttgctctcactttgcgtaattgctttttctgatgccgcattgtgatcatcactgtttttgtgattggcaaattgaatgatcgcgtacacaatggcaatcacgacaatcacgccgagaataacaagtattgttggcagcagctccagcgccttagatgctggctttggcatttccttttgaagattcatgccggagatcttttcagacacatcatcatgatacgtattagggatatcttttttatgctcctcaaacagctgatccgcatcaagcccaacggcttctgcatattgcttgatgaatgcccgaacataaaacttccccggaataatgtcatagtttccttcctccaaggcggttaaataccttttttgaatctttgttgccgcttggagatcatccaatgacattgctttttcctctctggcttctttgagccggattcctagttcagtcacaacaaacaccttccaattttaaaaatcaaagcttgaaaacccggattgatcaaacatttggggttcctcggcatgttcatatgtaataacctcatcagggtcatttctcagttcaataatataatcaaagtcatctagtgtatactctgtattttgaacgaatatgtccggatgctccaccacttttgttgcaggcagccgcatgatttctcggaccagctggagatggcgttctgaccctcttcgtgttgacacaattccgtcaacgataaagacattttcagtgctgtattcatcggcaatcagctggcttcttatcgtctgcttcagcaaggttgatgacacaaacagccaccttttgctcgcacacacactagaggctacaatcgattccgttttcccgacacgcggcatacctctgattccgattaatttatggccttcttttttgaacaattcggccataaaatcgactaataagccaagctcgtgccgttcaaagcggaacgttttcttgtcatcggcatcccgttgaatataacggccgtggcgtacggcaagacggtcgcgaagcctcggttctctaagcttcgttactttaattgtttccatcgtttttaagattgattctaatcgtttaatttgatctatatggcggcacctgaggagcattccccttctggaaagatcgacgccgtttatcgttacgatgttgatagaaagcatcccaagaagagatgaaatatccccgagcagtccggggcggttcacttgaatttcatattcaaaataccattcgagctttgccaaatgatatacccccttcattgtggcaaaattttaccttcctttatcataaagcatttttctctaattagaaagaagaatgttgctgtgatgaggaaaacataaaaaagagaggaaaaatcccctctcttcctagtgagtgctgttattttcaacaagcttaaccatcatattggcaatggcgtgctgttcatcttttgatgctacactccaaagatctgccagcactttttcctgctcgttcttagattccacttcattagccaagtagctgccgatttctgtcgcaagatctgtaatcgtatcctggctcatacctttatcttgcgcatagttcagacggtcgccaaggaagtttttccagctatcccagttttctaatactgacatgcttgtttcctccatttcatgtgaagttacaagattattgtgtccttcgcaaaagaaactatacaccgaatattttcggatcagcagtgccagccgccattcaccgacagaatttggccggtgatatatgacgctttttcagacaggagaaaagctgttgcatccgcaatttcttgcggccgggccagccggccgatcggaatctcatcagcgatctcttctttttcagccggggtaaattgattcatcatatttgtatcaactgcacccggcgctacggcgtttactctgattccgcttggcgccagctccttagccaatccttttacaaatgaatgctgagctccttttgccatgctgtacaacacttcacaggatgctccagtctctccccaaatcgagctgacagccacaatcgctcccgatttattccgaatcatgcctggcagaaggtttctcgtcagcatatacggactcgccacatgaagctgaaccatttcctggaccgttgcgttatctacatccgtaatcagcccaaaatggcttcgtccgctgtttaaaacaatcgcatcaatcggctgaacaattgaacttgtcagcttatctgctccatcttgcgcggacaggtcagcttgtaatatctccgcatttacgccaaacatctgacttagtttttcagcaagctccgctgccgcgttttgatttgtattgtaatgcagcagcagattgtatcctctagctgcaagggtttcgctgatgcttttgccaatgccgccgcttgctccggtgattagtgctgttttgttcatcctctttccttctttccgcagaaaaacacccctcacactggagggatgttttgtttatgatttaggaacaaccttgcagacagtcagtctgtctgcagcgatttcctcttgtattacgttctggacatcctcgagggtaatctgctcgagtaccgttacaacatcaaacaggctcatatccaagaacgcataacgggtaaattgattggcgatgtattcaggggaattcagcgcttttaagaatgtgccgatctttttctttctggcaagttcaatcttttcagcagtaatcagttcaccggcgcgcaaaagcatgcttgaaatgtcttcagccaattgatcaggctcaggcgtatctccgccgatcgccgcaaaaccgaacccatattcagcagtaaaatcaaagctgaacgtttcgtcaatatatcctttttcataaagtgattcatactgggcagagcttttgccaaaaagagcttcaagcaataagttcattgaaagttcatgctttaagagctctttgcctaatttaaacggatttttggatttcagcccaacaaggcatttcggtccctgcacgttcattttgatctctttttcttttcggaaaaccgcttcttgctctttcacttcttctcgtttgatctccggctgatcagtatacggctttttcccctggttttctcttacctgagaaataatcgcttcaggatctacagggccgacaatgaaaaggagcatgttactcgggtgataaaacgtttcatagcattcataaagaaggtcttttgtaatatgtgaaatgctttccactgttcccgctatgtcaattctgacaggatgctctttgtacatgttttcaatgaccccgaagtaaagcctccaatcagggttatcgtcgtacatattaatctcctgcccgataatccctttttccttttcaaccgttttttcagtaaaatatgggtcctgtacgaaatcgataagcgtctctaaattgcgttcaacatttgatgtgcttgagaaaaggtaagccgttcttgtaaatgacgtaaacgcattggcagaagccccctgtttgctgaaatcttgaaaaacgtctccgtccgctttctcaaacagcttgtgctcaagaaagtgagcaatcccgtccggcacgtgaaccatctcgtttttacctaaagggacaaaccggttatctatcgagccgtactttgttgtaaagaccgcatatgtcttgttgaagccttttttcggcaaaacgtaaacatcaaggccgttggacattttttcatgatacagcgtctcctgaagctgttcatattcgattggtttgatcaagatgcaccctccgtcccttttaagaaataagtcgtatcaagctgaatcttttcgccggctttaatgatatcctcttttgtgacattctcaatattggcaagaaagtcttcgataggaatctcgacttgagcagcggcctgctgatataaaaactcagataaaccgtatgctgtatcaatcgtttccagcacttgatttcgaataacggcctttgtctgtgctatatcctgctcactgaaatcgccatttttcattgcctggaattgctcagcaataatcgaaaccgcctgttcaaaatttttcacttcaatgcctgacatcaccattaacaagcctttaaaactttctatacgcgaagccgcgtagtaagcaagactggctttttcccgaacattaatgaaaagtttagaatgagagaatccgccgaacaatccgttaaacacttgtaaagcaggataatcctgatctgtataagtgatgctggtgcggtagccgatattcagttttccttgcttgacatcctcttcatcaattacttcttttggctgaactttttcatcagcgtgattgttttcaatcatgccaagagtgcgctcttctgttttgaaatacttatcaattgccgattgtacctggttactgtccacgtcgccaacaacatatagatcaagctggtctttttggatagcgctttggtatgtttcgtataattgctctgccgtaatgtcatcgacatcgtcgatttcaccattgacatgaagcgcgtaaggatcatttttgcacatttcctgtatcagccttaaattcgaataacgcattttatcatcatagacggcttggattctttgcttaagcgtccgtttttcttgagccacatattgtgactgaaaagcgtctccctccaaagcaggtgaaaagacgagttctgcgagaagctggagccctttctcgagaagcggcgtttggtcttttaaatatttttcattcgggatttcaagcctgaacgtaatgacatgccgctctccttttttcgtaagatcagccgatactgacgtgccgtacagctcatccaagtatgaacgcaatcctgcggttttcggatggcttttcgttccgcgaagaagcacatgcgggagaagcgctcttttggtgacttgatcctttgtcagcggcgcaagcatcttaaaaataagcgagacggttttgaatttttctgtttttacaatgtgtgcggttaaaccgccgtgctttgatttgagttcattaacatatgacatatggaacctccttcgttcatttcttaattagtatgtattatgaccaattttcagcatccgcagaaacactctttcatgtaattatagcaactgtaggatttataaggaaacaataacctccgcatgctgtataggtacagttgtaaactgtgcaagaaagcgcaaaaaaagacggctggctagaccgtccctaagtttttttcttcttcactttttttagcatctacagtaaagagcactaaaaataaagaaacgatgctgcaaaacgccgagagtatgaaaataatccagtttgcattagacattaatgcagcaaaaacaggtggaccgagagctactcctataaagcgcatgctattgtaaaaggaggaaatggttccgcattgttcactttcaatcccttcggttatcaatgcatctaaagcaggaagagccattccaatcccaatcccgccaaagcttaaaaagacaaataaaaaataaaaactgtggttccaccacaaggcaataaacgaaagggttaacagaatcattcctgtaacaacgcaaaatttcattcggcctttatctttaccgatctttttgccagctataaaagaactggttgacaaaaacaaaagtgggattgccagtaatccgcctttagctactccgtcaatagcatacttgttctccagcgtatctgataaataaaataatacgccaaataacaaaaacataatgacacacccgataatgaagaccgtataaagccagcgaccatcctgtttaaaaattttcttcacactcttaataaactcagaaacagcaggcgcatcttcatcttcttcaggcttggccaccaaaaacaatacgagcaaaaagctgatcaaacagaaaaacggaataaaccaaaacggtacaaaccaataccaagaagccagtaaggctccaagtatgggactcagtaccttccctgacgtgttggcggtttcaatatcgccaagacccgcgctgaccttttcatcgtctcctttaaacaggtcgccgataaacggcatgacaatcggagcggcacctgcagaaccaatgccttgaagaacccgccccgccaagatcatagcataaggatttttcatataggtcgaggcaaaagcagctacggctccccccaatcctgcaatgaggaggcatggaagcaatattttttttctcccgaaacgatccgacaaatatccggcaatcggaatgcaaataattgctactactgaatatacagtaatgattaaagatacttgaaatgaagtcacagacagctttttctccatcatcggaagaacaggaatcagcatggagttcccgagtgtcatcacaagcgggacagaagacaatgcaataatatttttcattccatttttctctctcaacattttcacccattcactttcttgtcatcccttatatattgcgttaaccggaatgaaagtatgtacaaagaaacatgaatcagtgcaaataaaaaaacagacacatacaggcgtccgtttttagaatcgtttacgcaaaacatgaaatctgaatttatccgctctaaaataatttaaagaataaagcaccggtttatcgtgctgatcgtaatgggtttgttttaacagcaaaagagctgtttccggatcgcattcaagcactggagaaatggtatcgtgatagccgatcggttctatatcagttactgcatagctgattacggagcctgaatttttctctagcaggtcaaacatagattcttgctgatgagaaaaagaattcggcaaaatattcatcggaattttgtctatacaatacacaatcggctgtccgtcagctgtcctgactcgttcaaggtaaaaaagttcttgcccttctgccaagtgaaatctcttcgtatcatcttcagacggcataagcacttgtgatgatagaaaaatcgtgccaggggtcatattcgcctgttctatcatcttggttacactgttcagctgttcaatacccgaaagaaataacggcttagaatggacaaaagtgcctacaccatgccttctgataatcacatgctcttcttccagtatccgcaaggcttctcttagcgtcgctctgctgacaccaagctttttggaaagctcaaattcagaaggcagcttttccttctcagtgtagatcccattttttatatcctctttaattcgttcaattactttcaaatacaagtgccgattatcagcttttgtagacatgtttcccctccgtaaaccactttcgataaaaattattgaacaattgggacaactatatcatgttttgtcgaaaaaataaatagaaaggtgatcagtttacataatatcattattgacaactatagaaagcggaactcccttcattaagaagagagctcatcatatttctcttttgataataatacttccctaggtttgctgccttcatacggtccgacaacaccgcgttcctccattgcgtcaatcaggcgcgccgctctcgtatagccaattctgaatcttctttgcagcattgaaacagatgccgtctgcatgccgacgattaattcaacagcttcatcataaagttcatcagtaacctcggaatgagtttccgtcgtctcctcaggaatcatttcttcttgatattgcgctttctgctgagtaatcacatggtcgacgaccttctccacttcgtcatccgacaaaaatgctccctgcacacggacaggtttgttagcccctacaggtaaaaacagcatatcgccgcggccaagaagcttctcagcgccacccatgtcaagaatggtccttgaatccgtctgtgaagatacgctgaacgcgattcgtgacggaatgttcgctttgatcacccctgtgataacatccaccgatggccgctgtgtcgcaataataagatggatgccggcagcccgcgccatttgggacaatctcgtaatcgaatcttccacatcagatgaagcgaccatcatgagatcggctagctcgtccacaatgacaacaatataaggcagctctggctgtttcgctccttcttcattgttggcgcgttttatataatcattgtatccttcaatatttcttgtacccgtatgagaaaataattcgtaccgccgctccatttcattgacaacctttttcaaagcctgcgacgcttttttcggatcggttacaacaggagcaagcaaatgcggaatcccgttgtagacatttagctctaccattttaggatcgatcatcatcattttcacttcatgcggtttcgcccgcattaaaatacttgtaataatgccgttgacacagacacttttcccgctaccggttgcgcctgcgaccaaaaggtggggcatcttgtttaactcagccaatacagcttcacctgaaatattgcggccgagtccaattaacagcttcgcatccggtctgtcattcaatttagactccagcacttctttcagcgaaaccattgccacttctgcgtttggaacttcaattccgattgctgatttgcctggtataggcgcttcgatcctgatatccttcgcagcaagcgcaagcgctaaatcatcgcttaaattgacaattttgctaaccttcactccgacatcaggatatacttcatattttgttacggccggtccgagatgaacctgtgtgactttcgcctttacgccaaagctttggaatgtgcgttcaagctttctcgcattttcataaatattctttttatcagcctgctggccggtatgcttcggatctgccagcaaatccagtgacggcatctcgtaatccttattttcgagctctgtaaaggtcataggaggagcagaaacagtttcctgatcacctgtctccggttggatgtcctgaagcggcttcgacacaggttcggcgcgcttttctataactggagactcttcctcttcattacgatcagaaaagcttgagataatcggctctgaatgaataagaggcgatactgtttcataatccccctcttcatcaggaggctccggttccatttgctgttttttgcgggccggtttttgttttttgctcggcgctttcgtttttttcgatgactgcatatttgatttgaaggatttcatgtcatcaataaatgctaaccattgttcttttataaaacgtccaatcgggctcatccacttttttagcgtttcttgcagcgagcgtcctgttactaaaatcattccgatcaaaatcatgacaattgccatgatctgagaaccagtcgacgcaaacaaaaagtgtgaagccgcaaacagcagcgcaccgatcatccctccgcctaaatcaggtgaagcagagctgccattcatgtccattaaaaacaattcccacgtattgcgcaccacgcttgcagactcaatagaccctttgtgcgtcaaatttttaaatagctgcacgtgagaaagcagcaatatgcttgcgataatacagtacaacccggcctttcgtctcgttaaaaggcttggggtttttttcttccaaaacagtgagactcctaacaccaataaacctaacaagcataaaataaaccactctccagcaaaaaagcggaacaaatagataaacgtttgcccgactacccccagctgcaagattgcgataattgaaatggctatacacagcaatccgttgagctcgtattttatattgagctgtttcgcctgtttttttcttgattttcgttttttctttgccacactcatcaccttactgcgttaaaaaatgtaagttcatacataatgaagaaagcagccgtttacaggctgcgttttttctgtaggattcccctattatagcatattttgcccttaaaaaagggttggattcttatacgtttaatttcagcttttgtcccggtgaaatgtccggatgcagaaaatgcattggattggtgctcatgatttgaatgacttccgcttcattccctttcatttcgactagaagcggtacacctttatattcaatttgctcatgtgcgcttgtctcttggttctgttctgcaaacacaatttcctgaggcatcacggtataaagaatcattgaatcatccgtccttcttctttccttgcttcatcgatgagctcattcagtttattgattgcctgtccgacaccgcctgcgtgatcgatcaatccgtatttaactgcatccttaccgactacatttgttccgatatcgcgtgttaagtttccttttgaaaacattagctctttaaacttctcttcggttatattggaatggcttgtcacaaatttaacaactctttcttgcatcttatccaggtattcaaacgtttgcggcaccccgatgaccagcccggtgagcctaactggatgaatcgtcatcgttgctgtttcggcgatatagctgtaatcacaggatacagcaatcggaacgccgattgaatgccccccgccaagcacgatagaaacggtcggtttcgataaagatgcaagcatttccgctatggcaagaccagcttcaacatctcctccgacagtatttaatatgatcagcaagccttcaattttgggattttgttcaattgccacaatctgcgggatgacatgttcatattttgttgttttgttttgcggaggaagctgaacatggccttcaatttgtccgataatggtcagacaatgaatatttgtatcttggggcagctgcggaagcgtcgtttcaccaagctgctgtattttattcataatgctgtccttcgcatcatttttttcaggacgctcttcttctgtgttttccatacgatgatccatctcgctttcatcctttccgagtttctctttgtattatgaacaaagatacttcattcaatcccggcttgaaggacaaaaaataaagaccggagcagctccggtctttagtcagtcattatacttccataataattgggatgatcatcggtttacgtttcgttttttcataaaggaattggttcaaagcatcccgcattgcctgcttcagcgttgaccattcgacatttgatgtttcagtcgcttctgtcacgatggaccgtacaagctcagtagcctgtacgataagaccttcagactctcttacataaacaaagccgcgagtgataatttctggtcctgatacaagatgtttcttttgtttatcaagtgtaatgacaacgattaaaattccgtcctgtgaaagcaagcggcggtctctcaatacgatattgccgatatcaccgacacctaaaccatcaattaaaatattgccgtaaggaactttatccccaatttttacgttttggccgcggaattcaacgacgtcgcctttttcaattaagaagatgtcactgcgcttcatgccggtttcttcagcgatttttgaatgagctttttgcattctgtattcgccgtttacaggaatcaaatattttggtttaagcaggttgatcatcagctttaactcttcttgtgagccgtggcctgatacatgaacacgcttttgggcaaagatgacttgtgcaccggctctcgcaagaagatctactgttttagagtaaatgagttcctgcccgggaatcggagttgacgcaatgaccaccgtatccccttcttcaatgttcagctgtttgtgagctttgtttgccattcttgtcaaagcagctaatggttcaccttggcttccggctgtaataatggccacttcgcgcttcggatattttttgacatcctgtacagaaataaacaattcatcatctgcttcaatatatcctaactttctcgccagctgcaggacagattgaagattttttccggctacggcaatctttctgccattttgagccgctgcatgaatgacttgctgaatccggttaatattggatgcgaaaacagcaataatcacccggttctgtgaattatacagcgcatccgaaatttctccgctgacagccgcttccgaaggggtgtaacccggccgttccgcatttgcactgtcagaaagcagagcgagcacgccgctattgccgatcttggcgatctcgccaatgtcgcacgtctgattaagtgcaggtgtttggtcaaatttgaagtctcccgtgcatacaatagatccaagtgatgttttaaagctcacacctacagaatcaggaatgctgtgaatcgttctaaagaacgatacctttgttgattcaaatgtaatgacagatttggagtgaatttctcttaaatcagtttttcggttatgtccgtattgttttaatttctctcttaacagtgcaagcgtcagttttgttccgtacactggaacggacagcttgtttaataagtaaaaaacgccgccgatattttcatcgtgcccgtgcgttaaaaagattgccttgacgcggtcagcccgttcaatcaaatatgatatgtcaggaatcactacatcaataccgagcatttcgttttctggatgcataaggccggcatcaacgacaaatatgtctgagtcaatttcaatgacataaaggttcttcccaatctctccgacaccgccaagggcgataattctaacgttttctgtatttttctttttcaaaatctatatcctcctagtctcatacccgtccatcatcacttgttcctattataactgaaagtaaatttagaaaacaagataaagcagaaggtttagggaaaaccaatatgtaaaagaaacggtcaaactcagctgaatgtgagaatgaccgcgtttgtttcactgtatgaaattttcttacagttcgctgatcgtgctgcttaagctcagacgttcatcctcagttaatgggactagaggcagacgcacagaaccgacatcaagacctctcagctgaagcgctgttttgactggagcaggattaggcgctttaaacagttccttcataatcggcagcagtttctgatgaatcagtgccgcattagctgtttgcccattcgtataatttttgatcatttgctgcatatcagtgcctgcaatatggctcgccactgacacaactcctctacctccaactgaaagaattggaagcgttagagcatcatcccctgaatagacatagaagtcttcaggtgtttcagcaataatttttgtaatcgcttcgaggtctccgctcgcttctttaatcgcaaccacattcggaatgtctgccgccaaacggatcgtcgtttcaggagcaagagaagcaaccgtacggccaggaacattatagagcataaccggaagagatgtctctgccgcaattgctttaaaatgctggtacattccttcttgagaaggtttattgtaatacggggtaacaagcataacagcgtccacgcccgcttcctcagctttttttgtcagcttaatggaatctttcgtgttgttgctcccagtaccagcgataacgggcacccgtccgtttacttcttttaccgtatattcaaaaagcgcaattttttcttcagttgaaagggtcggagattctccagttgttcccgctactactaaagaatccgttccgtttttcaacaagtaatcaatcagtgtagacagtttttgaaagtctacgttccctttattgtcaaagggtgtaatcatcgctgtagacacatttccgaaattcattttattcacctcatcatgattcaatcacatttacttcgaaagttcaaacacttcatgcaaagcgtttacagcaggaaccatatccgcttcatggacgagcacccatatcgtcgtatggctgtcagccgactgaaggatcggaatttctttttctgaaagagccgatacaattttggacgtaacaccgggaacacccataatgcccgcgccgaccgccgataccttcgcgcagtttctcgtcaccattggatcatagcccatatccattaaaatacgctgagctgtttctgttttatttccggctaccgtatagacgatttcactaggtgtaatgttaaagaaatcgacactgattccagcgtttgccatagccttgaacacttcagtctgaacgttatactggccgattttcgcaggcactttgaactgcgtgacatctttgacatgggcgattcccgtaatcagcctttcaaaaacatcactgccgaccttggaagagtgatgtgatgtcaccaatgtgcctttatcattcgaataagtcgaacggacgcggatcggaaccttggcctgcattgcgatttccacagcacgcggagaaatgaccttggccccctgatacgccaggttgcagatttccgtatacgtcacaacaggaagcggttttgcattttctaccactcttgggtcagcagtcatcacgccttctacatcggtgaaaatatcgatgtattccgcatcaacagctgctccgagtgcggctgcagacgtatcgctgccccctctgccgattgttgttgtatcacccttttcagttgcgccctggaagcctgcgacgactaccgcatcatgattggcgagcacactgaataaacgctccggtttcatttcaatgattttcgcattagtatgctgatcattcgttaaaaagccagcctgagcccctgtcagcgcagctgctttcacaccgttatcaagcagcatgcttgtaaagacgacagaggaaatagtctctccgcaagataaaagcaaatcctgctccctaggagaaatcgctgactgatcgccgtaaagcagcccgagcaaagaatctgttgcatacgggtccccttttcggcccatcgctgaaacgacaacgacaaccttatatccttcactgattgcttctttaatatgccctaaagccagtttgcggcctttatcatcttttactgatgttccgccgaacttttgaacaattatcttcactgttttcactccaaattattcggacgtaacagaagagagcaggctgatagcgccttactctcttctattcgtctttagaaaattctctcttttatacgaggtttagttttttcaggctttctgcaatttgaacagagttccatgccgcgccttttaataggttatcagaaacaacccataaatgaaaaccgtttgctctgtccaagtctttgcggatgcggcctacaaacacatcgtttttgccgacagcatcagcaggcatcggataaagctgctggcttggatcatcctgaagtgtcacgcccggagcttctttcaatagatttttaatatcttcaactgtagcgtcatcacggtctatttcgatgtagacggactctgagtgcccagtttggattggcagtctcacacatgtagccgctacttgaaggtcaggcatgtgcatgatttttttcgtttcatttatcattttcatttcctcaaacgtatagccgttatcttggaatttatcgatttgcggaatcgcgttgaaggcgatttgatagtgttttttgtcaccttttacaggcatgatctcaggctctatttcttctttatttaaaatcgcctgtgtttggctgtaaagctcttttacagcttcattacccgctcctgatactgcctggtaagttgatacgatgaccttgtttaagccatatgctttgcggatcggttcaagtgccgcaaccatttggattgtagagcagtttggattggcaataatgccgttgtgttcatgcaagtctgcctcattcacttctggcacaacaagcggtgtattttcatccatgcggaacgcactcgtattatctataacaatagcgccgcgttttacagcttctggtgccaatgcttgtgatacgcttccgccggcgctgaacaaagcaatatttaccccttcaaagctctcaggagaagcttcctgaacagtcagctcttggcctttaaacgtgacttttgtccccgcagagcgttttgaagatagcaatgtaagtgtgtccatttcaaagtttctgtcttcaagtgttttaagcatttgttgtcccacagcccctgtcgctccgacaacagctacgtgtaaacctcttcccatctgtaaaactccttccgccaatcagcttcattgaattgatttgactatgattttacgttttattttaccatagaatatgcgggtgatgaccgaattttttagtttgggaaagattttctgtaaatttagtcatttccctgataattctcaactagaatcggctgaagctgctggtgcatgagtgccttttcaatcgtttgcggaagcagatccattttggctaccattgaattcggttttttaaatggatcatcttgcccgaatggaataaaaaagatattttttgttgacatgagcctcattaaatttgttccgtttaaaccaagagcatcatttgtcgagatacccagaacgacaggccgattgttccggattgtcgcttttgccgccatcagcaccgggctgtccgtcatggcatttgccagcttgctcattgaattgcctgttaaaggcgcaatgaccatgcagtcaaggggcagcttcggcccaagaggttctgcctttacaatcgaatcaatggcctcatatccagtcaggtcttcaatttttttaacccattctgcgccctctccaaatcgggtatttgtagattttacattaaatgtgacaaccggacggacttcagctccttcgttgaccaactcctcaatttgcgggaaaaccgcttcatatgtgcaatgcgacccggtcagcccaaacccgattctttttccttttaatgacgacatccttatttcccctcctcagcttgtatttcagccaaaagcttgctcaagacgtttgcaaggatttgcccagctgttttaggagcgacaatccctggaagcccgggagcaagaagtgctttaatcccttgtttctcggcatatttaaaatccgttcccccgggacgtgaggccagatccaatattaaggtttttggtgtcatgctagaaagtaccgtttgatttaaaatcatactcggtatggtattaatgcaaatatctatatcttttacatgctctttcagctcatcggtatgaaaaggaacgagccccatttcagtgatacgtgccagatgcgctgaacttcttgcccccacttttacattcgccccgagcgcggcaaatgtacgggcaatcgtcatcccggtgcgccccagaccgagaacggccacctgtgatccgtgtatcgtataatccgtgtgctgaatagccagcatgatcgttccttctactgtcggaatagagttgtatatcgcaatgtcatcccgctcaaacagcttaacaagttttctttttgcctgagctgcaatgttttctaaataggcgttagaaattcctgagaaaatgacacaatgtgcaggcgttctgtcaagatggtcctgttttaacacaacttcttcattcgaaaatacagtcgatacgacaccttctcctgttgtcgcggatactggaagaatgatgctgtctatttgctgaaaaggaatttcatcaatattgcattttactgccccggtaaaaccgtgatccaattggtcaaaaccgacaagatagatgtcagcctgctgttcagtgagctttcttataatttcgagctgtcttgcgtcaccgccgataactgcaattttcaatccggttaacattctaaacgttcaccttctttgtatatactggatctctagttgttaagctccccttcatcttatgatcaaaaggaaataccggtgaatataaaagatgcgctttttccatataaaaaaacatcggctccggcagccgatgtttcagatgttttctttagagcccgcttcacagtcaattgggctatttactcttgtcgaggaggcatttcctcaggtacatctaatataatcatatctgaaccgatcttttgaatatggtgccatgggacacgaatgtcatgaccttgctttctcaaaccaaaccacttaactgtgggaatgaggagtgctgtaatctgtccatcctgttcattgatttccaaatcggtctggccgagcactccgagccgttcagctcttttgatgtctacaatttcctttcccgataattcactgagccgcatgtctgtcacccccttgtactatgtatgatgaaagggattaaaaaatgcctgctccattatggggcaggctttcctttttaagacggcatattgccggaagggctgataagtgctaatgcatagtcttcggtaaacaattgtctggcaaggccattaacacgctctaagttcacggcgtttaattcattgataatttcatctaatgttttatgtttgccgagcagcagttcattttttccgtttcggctcattttgctgtttgtgctttctaagctcagcattaagcttcccttcatttgctctttgctgttttccagttctttcgaggtaatgccgtcacgttttaatgtggccagggtttcttgaattgtttccgacagctgctgaagctgatttgcacccgttccgccgtaaatcgttagcattccgctgtcctcatatgagctgtgatagctgtaaacagaataagcaagtcctttatcttcacgcacatcttggaacagccggctgctcatgctgcctccgagcacattgttgaggacgattaaatcataaatacgttcatggccaacctctaagcctttaaatccaaggcacaaatgagcctgctctgtttctttttttctcgtcagtttttccgtgtggaactcaggcttctcaaggcctgtcgctttgcctttcgcctcgtatgacccgaaccatttttctacatctttgataaaactgtcagatatattgcccgctaccgaaatcaccactcggtccggcgtataataatcatgcatgtattgtctgagagagtcaccgttaaaggaagcaagcgtttcttccgttcctaaaattgggtagcctaaagaatgattgccgtaagtggctttgctcaataaatcatgtacaatgtcgtccggcgcatcttcatacattttaatttcttcatatactacatttttctcttttttcagctcgttttcatcaaacgttgaatgaaagaacatatctgctaatacgtccagcgcgtaattcgcatgctcgtcaagcacctttgcatagtagcaggtatattcctttgaagtaaacgcattgacctggccgccaatacgatcaaaagattctgctatctcgcgtgcagattttgtgctcgtccctttaaagaacatgtgctctaaaaagtgagaaattccgtttatctccggcgtttcatgtctcgaacctgtgccgatccatacgccgatcgcaacagaacggactgtcgggttattttccagcacaattcttacaccattttgacacgtatatcgtttaatcaaatttgttcctcctattcaaagacaagctgccttcatctgttacttcaatagtcttgtttcatccattagttcagtgactgttccaagcgcatatcctttgtcttttatctgtgtaatcagcgcttcaagactttccgccgtagggtcagtcggatgcattaaaatcatggcaccattatgtatcttgcttaacactctcgtctgaagtacagacggagccggcttttgccaatcgattgtatcaactgtccacatgactgttcccatctgtttctctgctgcaatgtcgataaccgcttttctgaaacttccgcttggcggagcgaaccactttggcttaacgccgatcgtttgttctatttgttcattagtcttgtcgagctgctcggaaattcttcctgtagtcagtttgctcatatccggatgattgtatgaatgatttccgatttcatgtccgtcttttgcaatcttcttagcgagctgtacattgtttctcacccaattgccttctaaaaagaacgtagctttaacctggtgcttttgcagaataggaagcattttttccaaatactcatttccccatgccacattgattaaaaaagccaccatcggtttgtcaggatttcctttataaataggctcaggctgaagtgactcaagatgaacacttggttttacttgactgtacaccaaatctttttcccgaaacttaccatgctgtttcatttttttatatgattgttcaatattgacctttaatccattgtagcctggaatgcttttccacactttatcaattcttgcattctggggcttaacttcgtactccggcgctttttgaagcaattcttcatataacgggtcttttgacgccgtgacagtcaccgtatcttttttcattgcccctatataatcaagtgcatgcggattttccatcatctcaaatgagacaaaaaaaagaaataaaaaaacggcaaacggtacaaattttttgtacatgttctgtcccccctcacctcacattatgaaggagaaggacaaggtagaacccgcctgcttttgaaaagcttcaaaataaagaagccgggtctcccaggctccttttatgttttcatttaagattgttgttcttctttttctttctcttcacggagcaccgctttgcgggataaattcactcgtccttgtttatcaatttcagtgactttgacaagaatctcgtctccgattttcacaacatcttcaactttccctacgcgttcaagcgcaagctctgaaatgtgcaccaaaccgtcttttccgctgaaaatttcaacgaaagccccgaatttttcaatccgtttcactttacctaggtaaagttggccgacttcaacctctctcacaaggtcttcgatgatttttttcgctttttggttgccgctttcatctgtagaggaaataaagattgtgccgtcctgctcaatatcaattttaacaccggtttcttcgatgatcttattgatttgtttcccgcttggtccgatgacatcgcggattttatcaggattaatggtcattgttaagatcttaggcgcatatcgagaaagctcttttcttgattcgcttaatgttgcaagcatgctgttgaggatttccattctgccctttttcgcctgctgaagcgcttcttcaagaatctctctggaaaggccttcaattttaatgtccatttgcagggccgttacgcctttttcagttcccgctactttaaagtccatatctccgagcgcgtcttccatgccttggatgtcagtcaagacagtgtaatgttcgcctgatttgacaagacccatcgcaataccagcaactggcgctttaatcggtacaccggcatccatcattgcaagtgtgcttgcgcaaatgcttgcttgagatgtagaaccgtttgattcaagcacttctgaaacaagacggacagtataagggaagtctttttcagacggaataactggctcaagcgcacgctcacccagtgctccgtgtccgatttcacgacgtcccggtccgcgcatcggtcctgtttccccaacgctgaattgcgggaagttgtaatgatgcataaaccgtttcgactcttcgacacctaagccgtcaaggatttgcacatctcccagagcacctagcgtacatacgctgagggcctgagtttgtccccttgtaaatagacctgaaccgtgcgttcttggcaagaggccaacctctgaagagagcggacggatttgatcgacaccgcggccgtccggtcttactttctcttcagtaatcaggcggcgaacttcatttttcacaagcttggataaaatctgcttcacttgcttgattgtgtcttcatcatgttcttcatcctcgaattttgccacaactgcgttcttcacttcgttaatggcatcttcacgggcatgcttttcatgaacttggatggctttcagcagatcctcttctgccaaagcttttactttttcattaagctcttcatcaatttcaaagagcttaatttcagatttctctttgccgactgctgcaacaatttcttcttggaatgcaatcaggcgtttaatctcttcatggccgaacataatggcctcaagcatgatttcctcaggaacttcgtccgctcccgcttctaccatgttaatcgcatctttcgtgccggcaacgacaagattgatatcgcttttttcaagctgatcgactgtcgggttaatgataaattgatcatcaatgcgtccgacagtaacccctgcaatcggtccttcaaacggaatatccgatacagaaagtgcaagagatgaaccgaacatggcagccatttctgaagagcagttttggtcaacactcatgacaatgctgatgacttgaacttcattacggaatccatcggcaaacaaaggacggatcggacggtcaattaaacggctggcaagaaccgctttttcacttggacgtccttctcttttaataaatccgcccggaattttccctaccgcatataatctttcttcatagtttacagtaagagggaagaaatcaagcggtttaggttcttttgaagcggttgctgtactaagtactgctgtatcaccgtagcggatcatcacagcaccatttgcctgtttggcaagctggccggtttcaacggtaagcgttcttccggcccaatctatggtaaagacatgtttttcttgtcccatacaattacgaactcctctcttcgttgtgtgaaataatcaattactcctattatgaacgaaatgaattgaacatatcaatgtcaaagtagtatgtaaaaggatttcaatgatttgttataagaaatttcgctttaatacgataaaaaagcgggaatcctcccgctttttacgattatcgacgtaagcctagtttgttaattaactcacggtaacgagttacgtctttattacgcagatacgtaagaagattacgacgcttacctaccattttaagaagaccgcgacgtgagtggtggtctttcttgtgagtacgtaaatgctcgttcaagttgttaattgagtcagttaggatagcgatctgaacttctggagatccagtatcagattcgtgtgttttgaactcattgatgagttggtttttacgctcttgagtaattgccatcctgtttcacctccaaatcatatttagccccagttacctagcaaccgtcggtgacttcggattgccaagcaatggttttaagactacgaaaactatcatactaaaaatcgtgcctatatgcaaatattttagaataaaatttgcgtgcgttgcaagttatttccgcaaattgctgaaataacggatggcttcctgcttatctttctcaatttgctcagttaattctttgatgccattgaatttccgctcgctccgaatccgtttgtaccattcgatttttatagcggctccatatacctcttgattgaaatcaaacagattgacctcgatggaaggctgttcagggcgcttttcataaaacgttggcttatagccaatattgcaaacgccattgtaaacttcgccgttcacttccgcttttacggcatatacacctgtgggcggaacgatatagctgttatttaaaccgacattcgctgtcggaaacccgatggtccgccctcttttatcaccatgaatgacaattcctttaataaaataaggttgtccaagcaagacattcgccaattcaacatctccgttttgaagcgcggtacggatatacgaagaactgatttttttatcctgctccgttaatttttctaccattgtgcacccagcttttccgtctaaatcatccggcatggtcttcattgttcccttgccgtatttgccgtacgtaaagtcaaagcctgccactgcgtgctgcacattaaggccgataatatactggtctataaactgcttaggagaaagagaagcaaacacttcattaaatttaacgacatacagaacttctgtgcctaattgttcaatttggtttattttgtcttcaagaggcgtaatcagatcctttggttccttatctctgcccaacacgtgagaaggatggggatgaaaggtcatcacagctaatgtcagacctttttcttcggctatttgcttcgctgtgccgattaccttttgatgcccgagatgaacgccgtcaaaataacctaacgccatcactgattttgcctgctcctcttttattaaatgatgaggatgtgtaatatgtatcgtcttcacagaacggtcaccttttttctattgttcgcttttttgcatcaatacttttgccggctttaacagccctttttttgcaggatgagggaaatagatcgccaagcaggttccggattcagtaaagacggcaatacggtctccacttgtcatttcagaaaactgctcgggcgtctcaagcaaagccccattttctactttcttagctaatgtatcacttatgatccatttcggcaaatgattgagcgcacgttcaataggaactgtatgctcttccacggttccggattgggcctgtgcttcgagttcatcaaaagtaaagcattcgtcgagagaaaaatctccggatgccgtacggattaaatgagacatatgggccggatatccgagcttttctccgatcatgaccgccagcgtccttacataggtccctttggagcaagtcactgtaaaccggaagcttgcggtttctccatgatgtttaatctctgttgtcagggcaatgtcttcaatggttatcatacgtttcggacgttctacttcaatccctgctcttgcgtattcgtataattttttgccgtttacttttacagcggaatacatgggcggaatttgttcttgtttcccctttaaactgtttaaaaccttttctacatccgctttatcaatgtcgtgattgacaggctttgtttccaccgtttctccggtttgatcctctgttgtggttgaaaagcccaatgttatttctgcatcatacgttttagatttttcagttaagtattcgactatttttgtcgctcttcctacacaaatcggaagcacgcctgatacttccggatcgagcgttcctgtatgtcctactttttttgtttttaacagctttcggatcttcatgacacagtcgtgcgatgtcatgccaacaggtttatgtaaaaggagaactccgttaaccatttgcctttcactccttcttttgagtttttttcttataaacgaagaaagaggacagacgatatacgcctatcctctctttttttattcagatggtttctctgaatgtaattcgtgaatcagtgtttcgatccgattcccgtaatcgattgattcatcgaactcaaattcaatttcaggcgtttttcgaagtctgatgcggctgccgatttcggatcggataaatcctttcgcttttgccagccctttcagcgcttcttcccgttttttctcgtcaccgagaaccgagatatacacctttgcaatttgcaaatcacctgatacacgtacatccgttactgtcagaaaaccaattctcgggtctttcagcttgcggctgataatatcaccgagttcttttttcatttgctcgccgacacggtttgctctcatactcaattcaatcacctctaagttaaaaccactctgtcctagtgatcgtccgttcaatttcaggaaaagaatcgataaacgctaggacgcgctgcagttctttttctgtttgaacgcgagaggaagaaacagcggcgattccgaagctggttctttgccaggtgtcctgatagccaatctccgaaatcgaaacattgaacttgttttgaaccctggttaaaatccgcttcagaacggcacgcttttcttttagcgatcctgcatcataaatgatgcattcacactccgcaaatccgatcacgttctttcaatttcttgcatgacaaacgcttcaaggatgtcaccttcacgaatgtcattgtatttcttaattgcaataccacattcatagccttgtgaaacttctttcacatcgtctttaaagcgtttcagaacatctacttcgccttcaaagatgacgacgccgtcacgaattaaacggaggccgctgtcgcgcgtaatggttccttcagtaacatatccgccggcaattgtaccgattttagatactttgaatgtttggcgtacttctacttgaccaattactttttcttcatattcaggatcaagcatacctttcatggcagcttcaatctcgtcgattactttgtaaatgatacggtgaagtcgaatatctacattttcagcttcagccgtactcttagcatttccgtccggtctcacattaaacccgataacaattgcattggaagcagatgccaagataatgtctgattcagtaatcgcaccaacgcctgtatggatgattttcactttaacgccttctacttcaattttttgaagtgcagccgttaaagcttcagcagatccttgaacgtcagcttttacgatgaggttgatgtcttttacatcaccttgcttaatttgctcaaataaatcatcaagactgagcttcgctttatcgctgcgctgctcttcaagctgtttcgaagcacgggcttcaccgacagaacgagctgttttttcatccttaaagacaaggaattggtctcccgcttgagggacatcattcaaaccggtaatttcaaccggagttgacgggccggcagttttcacacggcggccaatgtcgttgaccattgcacggacacggccaaatgtattgccgactacgatcggatcaccgacatgcagtgttccagtctgtacgagcaacgtcgcgactgaccctctgcctttatcgagttcagcttcaataaccgttccttttgcctgacgattcggattcgctttcagttcctctacctcactgacaagcaaaatcatttcaacgagctcatcaatgccttttccagttaaagcggaaagcggcacaaaaatggtttctccgccccaagcttcagggacaagtccgtattccgtcagttcttgcattacacggtcagggtttgcggattctttatctattttattcacagcaacgatgattggaacctctgctgcttttgcatggttaatcgcttcaactgtttgcggcatgacaccgtcatcggcagctacgacaagaatcgtaatatcagttacttctgcaccgcgtgcgcgcattgttgtaaatgcggcgtggcccggtgtatccaagaacgtgattttcttgccgttctcttcaatttgataagcgccgatatgctgagtgattccgcctgcttccccttcaacaacctttgttttacggatgctgtcaagaagcgttgttttcccatggtcaacgtggcccatgattgtcacgacaggaggacgaatttcaagatcctcttcattatcaggctcttcgtatttttccagctctgtttcttcaagcacaatgacctcttctgtttcaacaccatattctgatgcaatgagttcgattgtgtctttatcaagctcttggttaatggttgccattacgccaagaagcatcagctttttaatgagttctgaaggctctttgccaagctcttcagcaagtgcgccaactgttaaagtgccagagaatgtaattttctcaggaagctcttttttcggctttacaggcttttgctgatgttggtttttattattgttgttgttgcgtttattttttttgttgttgttattcttcttgtttttgttaaattgattattctgcacgtcattcttctttccgtctcgaattttatttggttgatttccagctgattgctgattaaccccttgtggctgtttgtttttgttcgtttctgctggcttttgagatttagcagctgcgccgccttttttatatttggcatctagctttttaatggccttttcttcaagcatggccatgtgattattcacttctaaatccatgttcttcagtgcggtcaaaatttccttacttgaaacatttaacgcttttgcatattcgtatactctcattttagccattcgttcacccccaaaaatattaatcgagcaagctgatcagcttattcgcaaaaccttggtcagtgacggcgacaacgacacgggcttctttaccgatagagcgtccaagaaccgcgcgactctcgacttttttataagggactttataataattgcacttgtcagttactttttttgctgtgttagatgatgcatcctctgtaagcaggacaagctttgcacgcgcattcctgatttcttttattaccaagtcttcgcctgacacgaccttacgagctcgattggccagacccagcaagggaaaccattccattccagacattttattttttcaccttttccgccagttccagcaattcatcgaaaatctggtcatcgatttgtgattgaaattgattttgcaaagtgtttttcttttttgctgctaagatgcactctttatccagcgttaaataagcaccccgcccattcttttttccggtcgggtctactgagatttcgccttctttcgaccgtacaactcggatcagttcctttttaggcttcatttcaccagtcactacacatttgcgtaatgggatctttttgtgtttattcacctaaagtcacctcttattcatccgattcagcagtttcaggctccgtaaagagcggctcatcatcttcttcaagttctctcggatagattccaagttctcttgcgtccgtttcgctcttaatatcaatcttccagcctgtcagtttagcagctaagcgtgcgttttgtcctctttttccaattgccagagacagctggtaatcaggaacaataacagttgtcgctttttcttcttcattaacaatgacatcaagcactttggaagggctgagcgcattcgcgacaaattctacaggatcactggaccagttgacaatgtcaattttttcaccttttaattcattgacgattgcttgcacacgctggcctttaggccctacgcatgaaccgacaggatcaacgtcaggatcatctgtgcgaacagaaattttcgaacggtcgccggcttctctggcaacagattttagctcgacagttccatcataaatttcaggcacttcaatttcaaacaaacgctttaacaggcctggatgtgttcttgacacataaatctgcggacccttcgttgttttttctacttttgtgatatataccttaatgcggtcatggggcttgtagctttcattcggcatttgctcattaaccggcagcaaggcttctattttgcctaaagacacgtagataaatttattgtccagacgctggacgatccctgtcatgatgtcttcttcacggtcgataaattcagaataaatcacaccgcgctcagcttcgcgcacacgctgtgtgacgacctgcttcgctgtttgagcagctatgcgcccgaaatccttaggtgtaacttcgatttcgacgacatcgccgaccatatattccggatggatgccctgtgcctcttcaattgagatttctaatctctggtcgtatacttcgtcaacgacatcttttcttgcaaatacacggatggagccagtttcacggtttagatccacccgtacattttgcgcttgattaaaattccgcttataagcagaaattaacgcagcttcgattgcttcgatgataatttctttactgatgcctttttctttttcaagaatcgtgagagcatctaataattcactgctcatttaacggtctccccccttaaaacatttgtattcattagaatgtaacagctaatcttgcattagctatcttttcatacggaatattgatccgtttctttcttgttttgatcgtgatctcaactgtcactgtttgtccatcaaattcagccagttcaccttcaaacacttttacgccgtcaataggctcatacgtcttaatgtatacgttttttcctagtgatttttcgaaatcggcttttttctttagcggacgctcagctcctggagatgagacttcaagaaagtaattttggctgattgggtctgcctcatcaagcttttcgcttaaagcttcgcttactttggcacattcctcaatatccacaccgtcatcggaatcaataaacacgcgaaggaaccagctttggccctctttgacaaattcaatgtcaacgagttccagctgaaggctgtctacgattggctgagccatttcttgaacggtgtcagtcacttttttgctcatgttcttcctccttgtgctgtcgatctcatattcgtctcgtcactctgcataaaaaccctgcttcaaaagagcaggggctaaaaagtaaacgatgaacatgtcgagacaaaattctcctgttcaatacaaaagagcgggtttccccactctttgcctcggtaatcgttagcatttccaataaaactataccataaccatatttttattgcaaatggatatacgcttaccttcatacctaagcaagtgacagaaactctaatattacgatggcactttttgcgcttatgtatgcatagaagcagaatttctgagaaattctgctttccatattagaacagtgacaattggttttgatcaggcagtgactccagacagccatggcgatctaagtactctaaaatcgtttttgatactttccctctcttttgcaaatcttcttttgagaggaattcgccttcttcgcgagcttttacaatgttcaaagcagcgttcgtccctaaccctggaatagagttaaacggcggaataagactgttgccgtcaataataaactctgtggcgctggagcgatataaatcgactttttggaatgaatagcctctctcacacatctcaagcgctaattctaaaacagtcagaaggttcttttccttcggtgaagcatcaagtcctttagcgtttatatcctccattaccgctctgattgctgtagagcccttgatcattgtatcaatatcaaagtcatctgcacgaacggtaaaataagccgcataatacaaaagagcatgatgcactttaaagtaagcaatgcggactgccattaagacatatgccgcggcgtgggctttcgggaacatgtatttaatctttttacaggaatcaatataccagtctgggacattgttatttttcatttcttcttcccattcaggcgttaatccttttcctttacgcacgaattccatgattttaaaggcaagggacggctcaaggccttgatagattaaataaaccataatgtcatcacggcagccgataacctcactcagctcacaaatattattgtggatgagctcctgtgcattgccaagccatacatcagttccgtgagacaagcctgaaatctgaacgagctcagaaaaagtggtcggctttgtatcttcaagcatctgccggacaaatcgggttccgaattcaggaattccaagagtgcccgttttacagccaatctgttcttcagtcacaccgagtgattcggttccctggaagatcttcatcacttcaggatcatccgtcggaattgttttcggatctattccgcttaagtcttgaagcatccgaataacagtcgggtcatcgtgtccgagaatatcaagttttaacaggttgtcatggatggagtggaaatcaaaatgagtcgttttccactctgaacctgtggcatctgccgggaactggatcggtgaaaaatcataaatatccatataatccggaactacgataataccgccagggtgctgtccagttgtacgttttacacctgtgcatccctgtacgagccgatctatttcggcaccgcgcatatgaagattgttgtctccggcatagccttttacataaccgtaggctgttttttctgccaccgtgcctattgttcccgcacgatatacattgtcttctccgaacaatacttttgtgtaattgtgtgcttgcggctgatattcccctgagaagttcaaatcgatatcaggtactttgtcccctttaaatcctaagaacgtttcaaatggaatatcatggccgtcttttttcaaaggcgttccgcaatgagggcatgtcttgtcaggcaggtcaaaaccagaaccgacagaaccgtcattaaagaactcagaatgctggcactcaggacaaacatagtgcggcggcagcgggtttacctcagtaatctcagtaagtgtcgcaactaatgaagatcctacggaaccacgggaaccaacgagatacccgtcatctagtgaacgttttacaagtttgtgagagatcaagtaaataacagcaaatccgtggccaataatactctttaactctttttcaatccgcgcttcgacaatttcaggcagctcttccccgtaaatgcttcttgcacgctgatagctcatttctctgatctcttcatcagcgccttcgattttcggcgtatataaatcatctttaatcggcttgatgtcatcaactaaagaagcaaccttttgggtattggtgactacgatctccttcgctttttcttcacctaagaaagaaaaagcttcaagcatttcgtctgtcgttctgaaatgcactttcggcagttcatgcctattcagcggatttgccccgccttgtgaggatattaaaatctttctgtagattttatcctcatcattcaagtaatgaacatttcccgtagcaacaaccggtttattaagcttttcccccagcttcgtgatattcgcaataatttctttcagcgctttttcatcacggaccagttcaagctccagcaagtgacgatacacttcaggcggctgaacctcaaggtaatcatagaatgacgcgatatcttccacctcttcaggcgatttttgcatcattccctcaaaaacctctcccctgtcacaagcagaaccgatcagaagcccttccctgtatttctcaagctgagatctcggaatacgcggcactctgtaaaaataatgaatatgagaaagtgacacaagcttaaataaatttttaagtcccgtgctgttcacggcaagtaatgttgcatgatacggtcttgatctttgataagcattggactgacccatattttcattcaactcatcatggtactgaatacctttttcagctgcgtctttcagcattttcagaagcaaataagcggttgcctcagtatcatagatcgcacggtgatgctgtgtgagctcgatatcaaactttttacaaagtgtgttcaaccggtggttcttaaattccggatagagaaaacgtccaagttcaagcgtatcaatgactgggtttttagctttttcgacttcaagaagttttttataggctacatttaagaatcccatatcaaagcttgcattatgagcgacaagaatatcatcgccaatccattctctgaaatctcttattacatctacgacatccggagcgtcttgtagcatatcatctgtgatccctgtcagctctatgattgtggcggaaagcggacgatgcgggttcgcaaacgcctcaaatttatcaataatttctccgccttttacttttactgcagccagctcaataatggtatcgtatacagcagacaatcctgtcgtctcaacgtcaaaaacaacatatgtttcttcttcgagcagacgatgtgcggcattataagcaattggcacgccatcatccacgagattcgcttccatcccgtaaatcattttaattccatgctttttggccgcagaatacgcatcagggaaggattgaacgacagcatggtcggtcaaagcgatggcctcatgcccccattttttcgcctgttcgacaagctttccgatacccgtaacagcatccatttggctcattggggaatgaagatgcaattccactcttttttctccttcaggtgctgaatcttcacgggtttttgcttttatttcgtttacgtcatttgcgatcatgacaaggtctctgacaaatgtatcattttgaatgcttccgcgtgcttttacccacattccttttttcagagacttcatcagcgccgcatcttctttttcacgtgcaaacattttgatcaaaatactatttgtatagtctgtaattttgaagatacacagcgtgcgcccgctcttcagctcgcgcgtctccacatcaaacacataaccttggaccgtaattctccgttcttcgtccatgatgctgtcaagtgttcggatttcctcgttatctttaatttgataaccgataacaagaggaccagatggtgcttggtcttcatcactttctttatctttcttctccatttcaatcaaggcctgcatagcccgctcttggtcttccgcaagcttttgctcccgaaacttttgaacttcttgctcggatacaaatatttcagcatcaagctgaagatccggaaagccaaattgacggtattctgcttgaatcatggaactgtatttgttctttagcgcagccgcttctgtatctgttttggttttgacaatcagtttattgcccttcagcttcggtttttgctggtttaaaagactgataatcggcggcgaaatgccctgcagttcttcaatgcagcgtgaccagtagtcttgaacgatactttcactgacctcggcatcctgaacttcaattgaagatgtcacttttgctatgtgggcaaacgattgcgtcagcctcgttgttaatgtgtcatatatttgaaaaggcagcaaagatttaaattgaaaatgaaaatgccaagacttagaagctttgtgaattgtcagctttttaatctcgccatgttcaaagtatgtcatgaaggtatcatctgtcatattaatctgctgcagaagaatttgaaactgccttctgtttactgataactgttccattaagacagtatccctccctaaaaacatcataagtgaaggtacctcaggcaatgaggtaccttctattatttctattttaacatgttttttgataaatcgttatggtgattactgcttgctgataaacgcagataattcgtctactgaaatctcagttgactcaccagtttgacgaattttcacttcgacgattccttcgtcagctcgttttccgacagtgatgcggattggaaggccgattaaatctgaatcagcgaattttacgccggcacgctcagcacggtcatcatagagcacttcatagccttccgcttttaaatcggcatacagcttttcagcaagctctctttgcccatcgtttttcatgttcaaagcaagaatatgaagatcgtacggcgcaacgctttttggccatattaagcctttttcgtcgtgatgctgttcagcaatagcagaaagcgttcttgacacaccgattccgtaacagcccatcagcattggctgcgcgcgtccgttttcatctaaatatgtcgcattcatcgcttctgaatagcgtgttccgagcttaaagacttgtccgacttcgattccctcagcaaaacggatcgttcccttgccgtctggtgaaggatcaccttctttaataaaacgaagatcagcaaattctttaatttgcgcgtcacgattcacattgacatttttataatgatgatctccttcatttgccccggcaacagcattaaccattgctttcacagcttgatcggcatatacttccacatcctgatgaataccgacagggcctacaaagcctggctctgttccgagctgctgaatgacctcttcatgtgtagcaagctctacaacttctgcatgaagcaagtttttcactttaatatcgttaacttcatgatcccctcttacaagcactaagacaaaacggtcatcagctttaaacaatactgacttaatgcacgcttcagccgaaacctgtaagaacgcagtcagttcttcgattgttttcacgttaggcgtatgaaccttctctagagctttaggctcttcatctgaaggaacttcctggtgaagaacttcagccatctcgatattagccgcgtactgtgattcatcagaatacgcaatcgtatcctctccgatcgcagaaagtgccataaattcgtgcgtatcctttcctcccattgcgcctgaatcagcgataacaggtcttacattaatgccgcagcgggcaaaaatattagaataggcctcgtacattttttgatacgtttcatccaggctctctgcagatgcatggaaagagtacgcatccttcataataaattcgcggcctcttaacaaaccgaagcgaggacgtttttcatctctgaacttagactgaatttgataaagagtcagagggagacgcttataagatttaacctcatcgcgaacaagcgaagtgataacctcttcatgcgttgcccctaaagcaaattcacggccatgacggtcttttagtctcatcagttcgggaccatacgtataccatctgcctgattcctgccatgtctctgcctgctgcaatgcgggcatgagcatttctacggcatcaattttctccatttcctctcgaacaatctgctgaatgttttgaatcaccttatacgcaagaggcatatagctgtataccccgctcgtattctgtctgataaatcctgctctcagaagaagctgatgactttttgcttcggcatcagctggaacttcacggagcgtaggaataagcgtcaagctttgtctcatttcttcgcacctctgattgatttacttttcgtttacaaaaacagccgctggatatcgttccatgtgacaaccagcataagaagcattaagaaagctactccgataaacacaacaaatgcttctttttccctgttaatcggtttgccccgaatcgcttcaataaatagaaacaacagtcttcctccgtcaagtgccggaatcggaagcaggttgacaatcccaaggttaatgcttaaaaacgccgcaaactgaaataagttcacgatccctgttttcgccacttggtctgtcatgtcatatatgccgacaggacctgacagcatatcgagtttaaattggcctgttactaatttgctcagattggttaaaatggctttggtgacatcaactgttgatgtcgcgccgtaagcaaccgctgagagtacgcctttttcagtcggcgcataggaaccgaaacgtccgattgtttttttgttctcatctttaacagcttccggagtcaccgaaatatgaagcgttttgttatctctttttactgcaacgtccatttctttctccgggttttcttttacagcggagacaatgtcagtccaagacctcattttctctccgttaatgctttggatataatccccttcttttagccctgcttcagccgcccgtccattgtctgtcagctgcccgagcataggttcatttgacggtacgccttgaatcagcccaagcatcactaaaatgacgtaagctaaaataaagttcataatcggccctgcagcaattgctttaatccgctgccatacaggtttggaaccaaattggcgattatacggcgcaatctgcacttcttctccgtctacaataaaaaaggatgtttcgctgacagtaaagctggaaagttcgtcctctttcccctgttcataaccggtgatcttcatgtcatgctctagatccgctgtttccacttcaatgactaaagcatccggatatttttccttttgattgatgatgactttctcaacttgatcttccttattaaacagaagcccgaccgtgtatccgggtttcacctcaatcatttccggatcttcgccggccatacgaacaaatccgccgaccggaagcagcctgatcgtataaactgtttcattttttttgaaagaaaaaatctttggaccgaagccgatcgcaaattcacggcagagaattcccgctctttgggctagcaataaatggcccagttcatggaagaaaacgagcgttccgaaaataatgataaacgctataactgtattcacgaacataccaccttatgtgagtattgaattgacgtatccccgggtatctttgtccacttcttgaatgtccgccaggctcggttttttcagtaattgatggcgggttagtgccttttcgatacagtcttcaatagccaaaaacggtatcttgccagctaaaaaggcagcgacagctacttcgtttgccgcatttagcactgtcggcattgttcctcctattttacctgattcaaaagcaaattgtaagcatcggaacctgtcaaaatcagctttctcaaaatgaaggctgccgatttcccataattcaagccttttcgcatctggtaatggcaatcggtcaggataagtgagcgcatattgaatggggactctcatatccggagttccgagctgtgcgatcacacttttatcatggaactcaaccattgaatggatgatgctctccttatgtaaaaccacatcaatttgttcataaggtatatcgaaaagccagtgtgcctcgatcacctctaatcccttattcatcattgtagccgaatcaattgtaatttttgcacccattgaccagtttggatgttttaatgcatcttcaaccgttactgattcgagctcctcccgcgtcttgtcccgaaaacttccgccggatgccgtaatgatgaggcgttcaatgtttttagcctgttcgccttgaagagcttgaaaaatggctgaatgctcactgtcaacaggcagcagcggaacatcatatttcttagcatgttcttttactatatgccctgcagtgacaagagtttccttatttgcaagcgcaattgtttttttctgttcaattgcctttaatgtcgggataagaccgacgcttccaagcaaagcgttgacaacaatgtcaacctcctccatcactgctgcttctatcagtccttcttctcccagcccgatttggcattcaaaagaaaaagacatttgttttaatttatgatatgtatccagatcaccgacagagacaaacttcggctgaaagacctcaatcattggaacggccttatcaatatttctgccaaacgacatagataccagctgaaattggtcttgatgtgcacgcagtacatcaagagtctgttcgccgattgatcctgttgctcctaaaagacaaatatttttcaaagttgccactactcctattcttattgctgcatgatcagtctcatattcatattagacttttttatgaaaaaagggcaagcagaaagtacaagaaaggcatgacaaacaagaaactgtcaaaacggtctaatataccgccatgcccgggaagaatattcccagaatcctttacatcgtaatgtcttttcaaggcggattccactaaatctcccagttgtccaaaaacagacaaaaacagcgtgatcaacagcagatagatatacgggatcggaagttgtgcaacaagctgaaaaatcgtcgccaatacaagtgcgatgacaattccgcctgcaaacccttccactgttttattcggactgatttcaggccacagtttccgcttcccaagcgatttaccgacaaaataggcaccggaatcggtggaccaaatgacaacacacgcataaaaaatgtatgttaatccgtattggtcaagatttctgatttcgataaaataatgaaaacacattccgatgtaaattgctgcaagcgtaataaacccgacttcatcaaaagtaaaggtgttcttgaccaacactgtgtaagtcagcaatagcagtaccgcaaataaagcgatttccattttggaaatcccgtccgcttcaaaaaacgaatactggcttggtaataagaacatccacaataataaaagaccgatcaaacccggcagtgaaaccagcttcagctttttcatccgtaaaagttcaaaaagcgccacactgcccatagcataaattaatatggtgaacggcaatttcccgacaataaccaaaaataaaaatacaattgctgccagaacacctgtcaaaattctttgtttcatgtccaccatcctctaaattccgccaaacctccggcctctctgctgaaactctcctaacgcctgcaagaagtgatcttctttaaagtcaggccacaagacgtcagtaaagacaaattcactgtaggcaacctgccatagcataaaattactcagccttatctcgccgctcgttcgaattaaaagttcaggatcctgcaaagattcagtcatcaaataagtagaaaaaagcgattcatcaatgtcttcaatattcaaagagccttccttcactttttccgcgagtgattttgcagcactgacaatttcagtacggcctccatagttaagagcaaaattaaggatcattccgtcgttttgcgccgtgtcctgtacagctttttcaatcgcacgtaatgtgtgcgccggcaaagccgtttcatccccaatgatccgaacctgtacattttcctcaacaagctctggaagatacgtattcaaaaattcttccggaagcttcattaaaaaatcgacctccattttcggtcttttccagttttctgttgaaaatgcatacaatgtcagtactttgacacctaattcgtttgcgagcttcgtggtcctttttaccaccttcatcccttcatggtggcctgcaattctgggaagagagcgttttttagcccaacggccatttccatccatgataatggcgatgtgttcgggaatttctcccttaagtatgtcttcttttgtataacgttctaagttggaagccgcagtttgctgattcttccaatttttgagtatgttgagcatgagattcctccgtcacccaaaaaggttacattccctgctgataatcaatgtaatcaacagtattaacaaaaaaaccccctgtaaacatgagagggtcttttcactattatctattgtacatagtttttcattaaacttccatgatttctttttctttgtcttttgtgacactgtcaatttttgacacatattcatctgtcagtttttgaacgtcttcagtggaagcacgcagttcatcctcagtaatgtctccgtttttctcaagttttttgagatcatcgttagcatcacggcgaacgttacgaacagctacttttgcttcttcagcatatttttttacaactttcactaattctttccgtctctcttctgttagtgccggaattgcaattcgaatcatattgccgtcacttgttggtgtaagacctaaatcagcttttaaaatcgctttttcgatatcaccgattgctgttttatcgtatggcgtgataacgagcatacgagcttcaggcacgttaatagaagacaactgatttaaaggtgtctgcgctccgtaatattcaaccgttactttatctaataatgatggatttgcacggcctgcgcgtacagtagccaattcgcgctgataagcagcaattgctttttccattttttcttttgtttgagttaatacttcttttgacacgttatttccccctcacgatcgttccgattgattcaccgataacggcacgtttgatatttccttcttccataatagaaaagacgataagcggaatgtcattgtccatgcataaagaggaagctgttgaatccatgacttccaggccgtctttaagaacgtcaagataagaaagtgattcatacttaacagctgattcatcttttctaggatcagcattatacacaccgtcaacgttatttttagccattaaaataacgtctgcctcaatttcagcagcccgcagtgcagctgtcgtatcagttgagaaatatgggtttcctgtgcccgcagcgaaaataacgacacgttttttctctaagtggcgtatcgcttttcttcttatgtacggttcagcaacttgtctcatttcaatggatgtttgcactctggactggattccgagtgtttccaagctgtcttgaagagcaagcgaattcattactgtcgccagcattcccatatagtcagcagtcgcgcggtccatgcccaggtcacttcctgtttttccgcgccataagttgccgccgcctacaacaacagccacttcgacttcaagctcagcgatttccttcacttgctttgcaatggattgaatgacagtcgggttaattccatttccctgttctcctgccaatgcttccccgctaagctttaatacgatacgtttgtattttggtttttccatgataacctccaagtgtaaacattgccgttttctattatgcaagagaaaaaaaggtttgtaaatatagttttaaaaatagggaacacaaaatgtgtcccctatactgcctgaaaagacgcgacttagccgcgaaatcttttcaccattattttttcacttggttcattacttcttcagcaaagttttcttgacgtttttcgatgccttctccaacttcatagcggacaaaagtttgaacagtagcgtttttcgctgcaataacttgtttcactttttcatctgggtttttaacgaacgcttggtctaatagacaaatttcttcgaagaatttgttcagacggccttcaaccattttcgctacgatgttttcaggtttgccttcttggagggcttgctgagttaagatttgacgctcatgatttgtttcttcttcagatacttgatcacgagaaatgtaacgagggttaactgcagcaacgtgcattgcgatatctttcgcagtttcttcatcagttgtaccgttgagaacagttaatacaccgatgcggccgcccatgtgaaggtacgcaccgaatgcagagctgtcgtcttttgtaagaactgtaaagcggcgaagagtgattttctcaccgattttagcaactgcgcttgtgatgtactcttcaacagttgagccattttccattttttggcccattgcttcttcaacatcagctggcgtgtttgcaagaaggtggtcagctaaagtgttaagaagctctttaaaaccttcgtttttcgcaacgaaatcagtttcagagtttacttctaggataacgcctttgttgccgtcagttttaataagagtagaaccttctgctgcgatacggtcagcttttttcgctgcttttgcaattcctttttctcttaaaaggtcaattgctttgtccatatctccgtcagtttcagttaacgcttttttacaatccatcatgcccgcgccagttttttcacgcagttcttttacttgctgtgcagtaattgccatttgtattcctccttatatgtttaaacaagagtatgtatattacacatttttcttgaaaaaaggtgataaaaggcagtccctcttatcaccttttgaataggttacgcagttgttgtttctgtttctggtgcagtttcttcagcaacttccgcttcttcttcgccttgcttcgcttctaagattgcatctgccattttagaagttagaagtttaacagcgcggatagcgtcatcgttcgctgggataacaacatcgatttcatctggatcacagttagtatctacgataccgatgatagggatgtttaatttgcgagcttccgcaacagcgatgcgctctttgcgaggatcgatgatgaataatgcatcaggaagatccttcatatctttaattccgcctaggaatttttcaagacgctctaattcttttttcaattgaacgacttcttttttaggaagtacatcaaacgtaccgttttcttgcattttttcaatgtctttaagacgtttaatacgtttttggattgtttcgaagtttgttaatgtaccgcccaaccagcgttggttgacatagtacatgccagagcgttgagcttcttctttaacagaatcttgagcttgtttttttgttccgacgaaaaggatttttccgccttcagcagcaagatttttagtgaagttgtaagcttcctctacttttttgactgttttttgaaggtcaatgatgtagattccgttacgctccgtgaaaatgtaacgcttcatttttgggttccaacggcgtgtttggtgaccgaagtgaacaccagcttcaagcaattgcttcatagaaatgactgacatgttatttcctcctaatataatggtttttttcctccgcttaggtcatttttgtacagaactgccgcctgcagcaccctctgcataaatcgttaagcgtgtgtatttaacaccaagacataatataacacagctttatccgacaatcaagaatcctttacacctttggagcgaaattttaaaaatagctcgatttctgtctttccgctcttcattttctgggcaatttgacttgccgaatatccctgttcatataattctatgacctggtcttcaaatgattggacctcactgtttacgagctcttcccgacggtcaacctctgtaatcagaccttcaatatgttcaggaagattctctgcctcttggactggatcccgctcttgatatgtttcagaggtctgaaggcctgacttttgggattcttcatctgattgacttgcagatgaagctttattttctatcagtttctcattttcttcttttaattcaagcagaaatgccgccaaggtgttttccgtctcttcaagtatctgtttttgctgtttttctgtttctttcactgcagcgagcctcgtatacaggataatgacagcgtacagaagaacgccgtggagcataaagcttaaaagccataatagtgttgacatgtttttcactcgctaaccatgaaattcattattgtatcactttttccagcagattctttaatttaaataatgcctttgaatggatctgagatatgcgggacgtagaaagatttaatacttgtccgatttctgtcagtgtcaactcctctttgtagaacaaactgacaaccagctgttctttttcagagagttcgtgaattttttccgcaagctgtgcaatcagttcatccttcataatcttttcttcaggcggaacatttttgtcatctctgatcatgacttgaatgttttccccgtcatcttgatcatggagcttttcatcaattgacagcagatttgcaaaaaaaccttcattcattgttgacacgacatcctgtaccgtcattccgagttcctctgcaatttccgcgggcgatacattccgaagataccgctgttcaagcttttcaattgctgcttcaaccttttttgttttttcgcgcgaggttctgggcagccaatcttctttacgaagcccgtctatgattgcgccgcgaattctaaacgaggcgtaggtatcaaattttaagtcccggctggggtcaaatttttcaagggcatcatataaaccaagcataccaaggctcataagatcgtctttatgcactgatttcggcagtccgacagaaattctgcctacatgatatgtgacaagcggcatgtaacggcgcattaagtcgtcaccggctttaggatctttccactctttccagcgcgtccaaagcacctgatcttcataattcaaggattgcattgttatccccctaataccttaattaaatcgttttttcaccttgtttaacagttcgaatatgcagcatgcaggacttcggttcaaattctatcgtccggccgcttgagccgcccgtatcttcactaataataggaatattaaataaagacagctgttcttttatcgctaatacatttctcggtccgatcttcatcaaatcatttgtcgatttaaatttaaacatctctgatccgccggccagctttgcttttaatgcaaatttccggcatcccgcttctatcagcatatcaatcgtggtctgtacggcggtgtcagcgtacttagcccggttgagctcggcagttttcgataacgtcgaatccggaagcatgacatgaacaagacccgccgtttgcttttctttatcataaagcaccagccccacacatgagcccaaaccagaggtccggatggtatccgggaagcgggcgatcttcacgtcagcaatcccaacctttataacaacagcctcagttgtactcataatgatgcacctaaggcgacaaagagcttttcaaatgaatcatagtccggcagcataaacatatgcgctttcagctcctgctgatggctttggtcaaaaattgacgtgtcgacaacaatggcgtgttctccaacctgactgagctccatcagcccttcgctgatcacagctccgaacatgtccaatgagacttcaggaacacttggatagagctggagtttcgtcaaatccgccaaagctgttaaatatgaccccgctaaaatattgcccagttcatgcaaagcggatgagctcatgtggtcttcacctaagtcctctatgtcaaaatcggggtttccaatcagctctctgataaactgctccgcctgaaaaaaaggcattataaagaacattgaacccgttaaatcgccttccattcttaaaaagatgctggcaaccgggacatcggcgccgccgaaaaaatcaacaagctcatcaaaagacagcagctttgcaaatgggacttccatatctatctttctatttaacagctgggccattgcagaggcggagtggccggcgcctatattgccgacttcccgcaaaatgtccatctgctcttctttgattccattaaaaatactcatgtcataacccctttaagattaagcttgatcgggcacagcggactgagatgattctttatccaaaaccgcgttcgcatcaataatatttaagagtctgttctcttgtttcacaatctgttcgatcgacacatccgtatctttctgaacgccttctggagcagattctatttcactttcgtgtacggtaatcacatcattcgcttcatccacaatccagccgacttcaatatcacgataagcaataatgataattcgtgtttcatctgtaatttcatactctggcaaattcaggcgttttcttaaatcaataaccggagtcaccaccccgcgtaaattgattaccccgcaaatatatggttcgacgccaggtaccctcgttggcttttgccatttttcaattgatttcacctgagtgacggaaatggcatattctttgccatttaccataaagactatcattttttcgcctgttttaatttctgcagtcatgtgagacacctcctcgaatggttaaataatcagtgcattacaatcaataatgagcgctacttctccgtctcctaaaatagtagctccggaaattgcaaagacgtttgttaaataatctccgagtgatttcagcacaacttcctgctggccaataaaggagtccaccacaaatgcagtaggtttgtcgccttttttcacgacaatgatatggagctgttccgcatcttttcttgtatcttctattttaaactcttcttttaaataaacgacagggacaatatgccctctaaagtcaatcacttcacggtcatgcgtttgcaaaatgtcttttctgtcaataactgctgtctcaatgattgaagaaatcggaatggcaaatgtctcttcttccaacttaatcagcagaactgaaataatagacaaggtaagcggcagctggatgctgaatagagagccttgaccctcggctgatttcacactgactgaaccgccaagagactccagtttgttttttacaacgtcaagtcctacaccgcggccggaaatatcagaaatttggtcagcagttgagaaccccggagcaaaaatcaattcgtaaatttggttgtcttctaaggtttcagcttctttttccgttatgaccccgcgctcaagcgctttttccagaattttttttcgattaaggcctgcgccgtcatcctctacttcgataaagacatggttgccgctgtgataagctttaagcacaacttttcctgattccggttttcccttttgcaaacgtgtttccggcgcctcgataccatggtcaatactgtttctgatcaagtgaacgagtggatctccgatttcatcaattactgtacgatccagttcagtttccgcaccgatgatcgagagttcaatttttttattcagctctttctgaagctggcgaatcattctcgggaatctgttaaaaacagtttcaaccgggaccattctcatattcagaataatcgattgcaaatctccggaaattctcgtcattcgttcaaccgtttcagtcagttcattatgctcaagctctttcgcaatctgctcgagacgcccgcggtcaatgacaagctcttcaaataagttcattaaagaatcaagcctgtcaatgttgacacgaattgttttagatccgccggctgaatgcttcgcctgttcatcgtttttagcaggctgtttttgtttctcctgcttcgcaggtacagctgctgctggtgaatcttcttgcttagattcttcaggcttttcagctgatgttaaaggagccccttgaatgacttcaacatgctcaatttccgacacgccattgattaattgttcaatgtcttccgctgattgatgtgttaagaaacaaacttgaaagtcagttccaaaatcttctgtttcaagcacttcagcacttggaattgttttggctacttctccgacttcatttagtttttcaaacaccatatagacacgaactgcttttaacatacagttttcgttcagagaaatcttgatttcatatcgtttgaagccttgctcctccgcttcttgtataactgtgcgttcaaattcatcatattcccaatcagatgctgaactctgtgcttctgcaggttcagcggaggcagcggattcagcgtgcgcaccattcacatcaagcttggcactcacttctgagatatctcttttaccatccccgccatcaataatagactgaaccattgtttccaggtgatccagagcttcaaacaaaatatccagccagtctgaggtgacttccatgtctccgtttcggattgcatccagcacgttttcaagcagatgggtaagatgtgctaaatccgtgtagcccatcgttgcgctcattccttttaatgtatgggcagccctgaatatatcatgtacgagctgaagatcagtcgggtctttctctaaaagaagaagcttttcattacatgtttgtaaatgttctttactctcatcaataaagacatctaaatactgattcatatccatttgaatcacaccctctcttttttcacacagcttgtgatggatgctgcgatatcttccacatgtttaatctcatgaatgagacccgctttaacagcagcttttggcatcccgtatacgacacaagattcttcagactccgcaatggctttcacattgccggctgttagcatgtcctttagtccagcagtgccgtcactgcccattccggtcatgataaccgctactttttcataatctgtcagtttcccgacagaacggaataaataatcagcagatggtttatgacggcttggtgtgtcatggttatcaagcacaacctggagtccttcgctgtttttaataacggatatgttttttccgcccggtgctatgtaaacacagccgttaagagctgcttcaccatcttttgcttcttttacctgaatgtcagataaatgattcagccgatcagccaaagaagcagtaaacccttcaggcatgtgctgaacgacaaccactggtgcgttcaaatccttagggagcttcggtatcaccttttgtaacgcccgtggaccgcctgttgatgtgccgatacacacaatttgtctgcccgtgccaggtttcggtttgcttaattcaggcttaacgacagcacgcacaataggttcgggccgaactgtctgggaaacaggacgtttccgcttgccggaaagtcctgccgcgacgacacgctcaactagttgttctttaattttgtatagatccagagatattgagcctgatggctttgtgataaagtcaaaggcaccgatctccaaacaattaattgtgcattctttacctttctcggtctggctagacaccataatgaccggcaagttataaatctcaataattttgcggagcgtatctgtcccattcatgaccggcatttcaacatcaagagtaataacatccggttttaataattcaatcttcttaagcgcttcttctccgtttctcgcagttccgattacttctatctgcttttcttcggtcagaaaatcacttatcatttttctcataaaagctgaatcatcaactacaagcacacgaatcaaattaagccctcctcattaaaaaagaagataatttctcaataaatgtctgtttgtcttctttgtgtctcgtttcttctctttcaaacaaggcgtccgctaaaatacggactgaccggctggcttttgcctgagggctttttatgaaaaaaggaacctgttcgacaaccgctttgctcacgatcacatcgtcagaaacggaaccggcaaactgaacctgaacatccaaaaacatatgaattgtacgggagaggcgggcaaaagcgtcaagcccttccttttggtcacggcaccgattgacagccaccttcattgaaagcttattttctgtcaaaaccaagtgcttgacagcgctgtatgcgtccataatggccgtcggctcgggagttgtaataatcaaaatatcttctgctgataaaataaaaggcagttgatcttttgataagcctgctcccatgtcaaacagcacataatcgaactggcttaatgcatgagaaagttcattggcaaaaaacgtccattttctctgatcgagctgaaacatcacatcaagaccggttccccctgatatataccgcaaaccctttgggccaacggataatgactgcagcaaaggcttacgatcggttaaaacatcgattatcgtggcagacgatgaatttcctattaatatatcaatgttccccatcccgatatcaaggtcgatgagcagcaccttcttacctttatcctgcagcgcaagtgccatatttaaggtaatattggattttccgacaccgcccttgccgctgatgacagcaagtgtcttcgctttttgtgaataaaccattggcagaacgcgctcacgtttttccattttcgcccgtaaagttgctgcttggtcatatctgttcatctgcacagcatcctcacaaaaccaagtggagatacagtctgtatatcctcaggcacattctggccgttagtcataaacccgacacctatttttgattctgccagtatattaaatacagaacctaaggaagtcgtttcatctattttcgtaaaaatatactgattgacagggacggatgaaaaccgtttgacaatatgcttcatatcttcatattttgcagtcgcggataaaacaagaaatgactgaatgctgctctcaaaaggaatcgtttctttcagttcatcaatgtattgcgggtctttgaagtttcttccagctgtatcaacaaacacatgatcatactcagaaaatagctccttcgcctgctgaaattcttcttttgtatagcaaacttccagaggagcctgcagcagttcagcgtatgttttcaactgttcaacagctgcaatacgatacgtatctgttgtaataaaagcgatttttttatgtttttcaagcatagatatggctgcgagtttagccagtgtagttgttttaccagcccctgttgaaccaaagagaacgatatattttgaatgaattggctcctgccacttgtctgctgagggcagcatatcgcatagtatttcctgaagtttgccgacaacattttcttcagtcaagccgcctgcttcaacagagaagcgaagcaattttttcagagtgttcgttttcgtagactctttgatccctgtttcttgcaaaagcttttctgcttttcgcagcggctcaggaagtacagattgatatgctgaaaaatcacctagctcctgttgcgccggaatttgagggggatatgttctctcctctatttttggactgctgaccggagtttttaatgtttgtttcggttcagctgccttctgaggcgtttttttctcaagaaagtcctgatccaatacggcgattacttcaacagcaggcttgttgacgaggccaaaccattttcgctttttaatttttttcgaatttaatatgaccgcttcattacctaactcttttctgatgagaagtgccgcttcttgcattgaagcagcagtaaatttttttattttcattaaatatccaccactccaatgctttgtacctcaacattcgcctcaagttcgttataagagagtaccggaagatcagggaagtaccgttccagtagctgcttcacatacattctgacaggcggcgagcaaagaagaatcgcggtttcctgacgtaatgagagctgttcagcttctttggcgacagagcgcactatactttctgaaatatctggttcaagtgataaatagttcccgtgttccgtctgctgcacaccgtctgctattgctttttctacacggccggaacaagtaacaaccttcaacacttcattttctttggcaaactgggctgtaatttgtttagcaagcgcttgtcttgtatactctgtcaagagatcagaatctgttgttaatttcccatagtcagcaagtgtttcaaaaatcgttactaagtttcgaattgaaactttttcttttaaaagcttagcaagcactttctgaatatcaccgacagacaatggattcggcgtaacctcttcaaccaggactggatacgattctttcaagtgatcgatcagctgttttgtctcctgccttccgatcaattcgtgggcatgctgcttaattttctccgtaatatgcgttgaaacgactgatgcaggatcaactactgtataaccaagcatgtcggcttcatcctttaccgcttcgctaatccatttagccggcagtccgaatgaaggctccactgtttcaatcccttcaatgagatcgtcctcaggagtaggcgacatcgctaaataatgatcaagcaacagctcgccttttgctacttcgtttcctttaattttcaatcggtattcattaggctgcaacgctatattatctctgattcgcacgacaggaatgacaagcccgagttccaaagccaactgacggcgtatcataacaattcggtctaataaatcaccgccttgattggcatcagcaagcggtatcaggccatatccaaactcaaattctatcggatctatatgcagaagctgaacaacactttcagggcttttaagctcgtccacctcagcctcttcctcaagaatctcatccacttcttctttttccttacctgatttagatagtgtatatgcgccaaaagcaagcaatcccgcaagcggccccgtcagaaggatgccgatcggagtgaaaatacctaaaagcatgatcgtagctgctgcgacgtataaaagctttggatacgcaaacagctggcctgtaatgtcatgccctaagtttccttcagatgcagctcttgtgaccacaatacccgtagccgtagaaattaacagtgccgggatttgcgaaacaattccatcccctacagtcagcatcgtaaagtgtgaagcagcttcttgaatggacatgccctgctgaagcattccgatcacgattccgaaaataatattgatcatcacaatgatgattccggcaatggcgtcaccttttacaaatttactggcaccgtccattgctccataaaagtctgcttctcttgccactttttcgcggcgatgcttcgcttcctgttcggtaatcatccctgcgtttaaatcagcatcaatactcatctgcttccccggcattgcgtccagcgtaaaccttgctgcaacctcggaaacacgttcagcaccttttgtaatgacgataaactgaataataataaggatgataaatacaacgagtccaactaatacatttccgccgacaacgaaatttccgaaagtctcgacgactttacctccctcaccgtgtgaaagaattgaacgggtagttgagacgttcaagcccaaacgaaatagggtcaaaagcagcaacagtgacggaaaaatcgaaaactgaagcgcttcctgcatattcattgtggtgagaagcacgatcaacgcaagagaaatattaataatgatcaaaatacttaacagccatggaggaaatggaatcaccagcatcgccacaatgaggacaacacttattaaaacggataaatctcttgttgacatgctgttttttctctccttttaaatcgaaaaattcaatatactttttgttttgttttatatacgtaagccagaatttctgctaaaactttaaaaaattcttccggcactgcctggtcaatttccacttgatcatataacgcacgggcaagcggtctgttttctaccatcatgacatcatgctctttagcaattttcctgatttttaacgcaaggtggtcgacgccttttgcaacaatataaggtgcgtccattttttcttcatcatatttcaaagcaatcgcatagtgagtcgggtttgtgataatgacatctgcttttggaacttcctgcatcatccgcctcatcgccatttcccgctgtctttgtttaattttagacttgataatcgggtctccttcagattttttgtactcatcttttatatcttgttttgacattttgatatttttctcatagtcaaatctctgatataaatagtcgagaccagcaagaatcaacaatgcacctgcaccgcttagtcccatccacaaagtgagttttgaaacgaaagaaagtgcctcttcgggtgtcaggagaggaagccggagaatttctccataatgcagccaaagcacagcaaaagccgcaaaaccgacgactacgattttcaaaattgatttaatcagctctacaatcgccctcatactgtatattcgtttaaagcctttgatcggatccagtttttcaagcttaggctgtatcacttcagcagaaaacaagaacccaacctgcatatagttgcttacgactcctgcaacaagagcaacaagcaagatcggtgcgagtatcatgcccatatcctttaataagctgacaaacaatgtatgcacatttgattctgagagcttcattgtgagcgattcggtataaaatgtttctatgaatgacagcagcctgtctctcatatacggaccaattgcaataagcgaaaggaatattaccagtaaagaaacggcggtattgacatccgagcttttggctacctgccctttttttcgcgtatccttccgttttttcggagtggctttttctgtcttctctcccgcaaaaaactgcaggtcaactctaagcttcattaagaaacaccgaccaatgctaaaagattccgcatcgtttcaatcgttaaactgaaaacattccggacaacgacgaagataacggacatacatacaatgagcataatgaaactgacagcgatctttaaaggcagaccgaccacaaatacatttaactgcggaacagttcgagccacgatacctaatgctaaatcaactagaaacaaactggccacaaccggcgctgacatttgaaaagcgataataaacattgcattaaagcttttcgcaataaaataggcaaacttttcatcgccgaaattcggaaatgcctgatcaactgaaatatactgaaagctgtagtaaataccatccagcaacaaatggtgggcattgacactcagcataaacaaaagtgccatcgtatagataaactggccaatcaacggactttgtgcaccggtttgcggatcaataacgtttgctattgaaaatcccatttgaaaatcaataaacgagccggcaatctgcactgcggcaatcatcatataagcaattaaacccagacataggccgaccaaagcttctttaaacgccaaaagcatatagtgctcatctatctccaaagagggcggtttatcaatggtgctgaaacaaatgaccgcaagaaaaaaagcaaaacctatgcgatgaacagctggcacatttcgatgtccaaatagcggaatcgttacaaaaaaagcagagattctaataaaaaccaataaaaaagcaggaaataagtcaataattgaattcatctctacattaccctgcaaaacgatttaaattagaaaacagctctgttgtaaatgaaagaatcgtcgacagcatccacggaccaaaaaaaatgagagccaggagaaccgccacgattttcggaataaacgccaaagtctgttcctggatttgagttgtcgcctgaaatatgctgacaattaaaccgaccagtaaagcaatagccaataatggcccgctgatcatcagcgttacgtatacggctttttccgccatagaaattacaaattctgaactcacgtttagcacctaccctaaaagctctgaagcaaagatttcacaattaaataccagccgtctaccaaaacaaaaagtaatattttaaagggcagagaaatcataactggaggcagcatcatcattcccattgacatcaagacgctcgccactaccatatctataattaaaaaagggataaaaatcataaaacctatttgaaatgctgttttaagctccgatatggcaaaagccggaaccattgttgttaacggaatatcctttaatgattcaggtttatccattttcgcgtaattcataaacagcgccagatccttctgccttgtgtgtttactcataaattctttaatcggttcctcagctttcgtatacgcttcatccaagctgattttgttgtccattaatggggtcagcgcttctttattaatttctgaaaaagtaggagccataataaaaaatgttaaaaacagcgcaagcccgattagaacctggtttgggggcatagattgcgtcgcaagtgaagttctgacaaatgacagaacaatgacgatgcgagtaaaacaagtcataagaatcaatattccaggcgccactgaaaatacagttaacaataatagtaatttaacagtcgaacttacgttttccggatcgcttgaactgaaaatatttataaactcattcatgatgacgtgggcctttcttctttccttcagaacggttttgttttaactcttcaagttgctcttttaatgcttttgaaaatgaaggcagtttttgctgcggctgatgttcagaactcttaagcggcttcacaaacttttgccactctattttgcttgacattgcctcttcatgctgactgagaatgacttcaatctctttttcatcctcaatttctttcagcagctggatcgtctctcctacaccgacgacgagcacacttttcccgaccttgatcaattgtatggatctgttctgaccgaccgatgtgccgccaatattttcaacatattgaaaaggctttaggagccgatttcttttgttcatgagcttaaccagcccgtaaatcagcacgataacaaacagtaaagcgaaaatcatctttacaaaatcaaaagctgagacagaaggagcagccgctccctccgtctcatcagcagtttttgttgttttttctttcttttgctctgattgatctgcagttttttcatctttcttttgaaaccattcgtttacagttgaattatcagagtctgccgcggcagcagcaatcggatgtacactgaataaaacgaaaaaacaaataaaaacaataaaatattgactctttttcaacagtcgtacaccctttaatttaatgttttgttgattgcttcaagcacacggtcagcctggaaaggtttcacaatgaaatccttagcgccggcctgaatggcatcaataaccattgattgctgtcccatagcagaacacatgatgattcttgcctgcgcatcaatttgtttaatttcttttaatgctgtaataccatccatttctggcatcgtgatatccatagtaacaaggtcaggtgaatgctctttatatttctctaccgcttgtgctccattttcagcttccgccacaacttcaaaaccatttttaaccaaaatatctttaatcatcattcgcataaatgctgcgtcatctacaattaaaattctatgtgccataatctatctctctccttgtgtttcgttattttaaattattaatgcgctctgcctggcttaaaatgtcagtgactctcactccgaagttttcttcaatgacaacgacctcgcctttggcaacgatacgctgattaactaaaatatctacaggctcaccggctaatttatcaagctcgataatacttccggcagaaagctctaaaatctcttttacgcttctcttcgttctgccaagctcaacagtaatcgaaagcgggatatccaaaagcatatccagattatgaataggggcttgtacagcttcgtttggatcaaacgcggaaaattccaccggtgaaacctgaactggcgctgctttttttgctgttccctgcctttttggcggctgctgctgttgcttcggttcaatacgcggctctggcgtcacaggctctttcggctgttcgtatgtaacttcaggctgcaccgtttcttcttcctctgcactttctgagttcataaggcttgaaattaaatctttcgcaaatgtcaatgggtaaagttgcataatgctggagtctattaattctcccacctttaagttgaaagaaactttcaccagcatttcatcatcaggaatacggtctgtacccttttcttcagtaacatccagcaattcaacccgaggaggtgaaatatcaatttttttactgaatacagtagacattgatgtggcagccgatcccatcatttggttcattgcttcttgaaccgcacttaaatggatttcacccagtgaagggtccgcaccttttccgtctcccccgatcattaagtccgcaatgatcgccgcgtcactttgttccacgactaacaggttgcttccgctgaagccctccgtataattcacttcaatcgctacatacggttcaggaaacgcatcgctgattttacttcttggaatgaccgttacgcttggagtcgtaatatcgaccttttgatttaaaagcgttgacagtgctgtcgcagaactgccgaatgaaatattaccgatttcaccgatcgcatcacgctccatttccgataagtcatctacttccggaatctctggctcatcaagcgtgctgccagtaccgttaagaagcgcgtcaatctcatcttgagataatctattattctccatcttgttcacctcttatgtcgtgatctaaaatttgcactgcctgttttcgattcacccggccggcttgtcctaaaaatttcggcttatctccgaccaatacagtaagaggatccgtgactgatttgtccaaagttatgcagtctccgacttctaaacttaaaaactcttctatcgtcagttcagatgtgccgagctcggccacgacaggtatttgtgctgtcatgatacgtttttcaagcgactttgtttcctcaggctttggctcatttcggtctgattgcatccaatagtggactgaaagcttcggtatgagcggctcgagtacaatatgcgggatacagagattaatgacaccgctgatttcaccaatttgagtattgagcgagatcaccacgactgtttcattaggagataccatctgaacaaattgcggattcacttcaaactcagtcatttccggttcaatatcagcaattgactgccaagcttctttataattacccagtgcattttcaaataaattagaaatgatttttgtttcaatttctgtcaaactgtcaaccttgttatgactgattccaatcccgcccatgactcgatccatcatcgtataagctatcgtggggttgacctccatcataattcttccttccatcggatgaacatcaaatagattcagaatcgtcatgtttggaatcgatctgataaattcctcatacggaacctgatcaacagaactgacagatatgtgaatataggttctgagctgagcagaaaaatgagtggtaagaagtcttgcaaaattgtcatgaattctcgttaaactgcggatctgatccttagaaaaccgcagcgcacgtttgaaatcataaaccttgactttcttctctttttcttcttttttcagctcttcagcgtccatttcaccagttgatattgcagagagcagtgcatctatttcattttgggagagaacttctcctgacattttcctcacctccgtattctgtcaaattatgctttattgcagattaaaggaggtaatatacactttttctacttttccttcttggaggtagctatttattttatcttttagttccttcttaaaggtttcttttcccttgtctccctcaatctgatcagcattcgtatcagccagcagtgatataacagcgtctttcacttggaaatcacgtttctcaagttcttcttttgatttatcagaatcagtttcaagtttaatagcaagacggataatgttatcagactttaaatttgttgtgatctcttctacatcaacagaagacgcaacgatttcatcaatactttttttcgcttcacttttttcggactttccgcctaaaacaaaataagccgccgccccgagagcaccaattacgataagaataattagtaatatgatcattaactttttcttcattccggttcctctattccttgatccattgcaaatatttgtatttttcggtagaaagctgcgatcttttccagaacagcttcttcatcttcttttactacaaacttcttaccatttgacagagtaattgtagtatccggaaaacattcaatctgttcaataaatagcgcattcagtgtaaagggctgcccgttcaaacgggttactttaatcataaaacagcggagaagcgattactcgcctcccctccctccttaacgtttaaggttaaccagttcttgaaggatttcatcagatgttgtaataatttttgagtttgattggaatccgcgctgggctacgatcatttcagtaaattcgtcagttaaatcgacgttagacatttcgagaaatcctgatttaagagcaccagttccgccgtcaccaggctggttcgctgcactggccgttccagagtttaaagattcacggtataggttgcttccgattttatccaatccatcactgttggcaaaagtaacaatcccgatttgtcccccgtcttgtgttttcccctcagcatcaacaattgacacctttccatcagaaccaatgctaaagctttgagcatcagtaggaattttaattgttccgccattcatatttagtacatggtagccatcacctgtaaccagtgttccagtattatctaaatagaagttccctgctcttgtataagctgtcccgtcacctgtatcaattcggaagtaaccgtcgccgtcaattgctaaatcaagtgttcttcctgtgctttgtgtcgcgcttgttgaatgaattgtatcaattgtgccagatgatgaacctaaaccgatttgcttagagtttgttccgccgattgttgcaccagcagcagaaccgccggcaatcgtttggcttaccatatctttaaaggtcacacggctctttttgaatcctactgtatttacgttggcaatgttgttaccgattacgtcaagctttgtttgaaagtttttcataccgctgattccagaataaagtgaacgtaacataatatattcccccagatgtttttatttagatgattgtcccacagacatgacattcgcaggactgatctcggtcccatcatcaagaacgagataataatttcctttaaaatgtttaacagagcttactgtgcctgttttatctgttgcacttttaccatcagtccaagatacttcttttcccatccaatcaacatacgttgtaaacggatcttggttttcaacgaattgagtcattgtcgtattcagattcatcatttgctccaagcttgaaaaagtcgccatctggctgataaattctttatcgtcaatcgggttaagcggatcttggttttgaacttgagtcattaatatttttaaaaactcgtctttccccaagctgctgttgttcgtcgacacagtgttcgttttttcaggcagtttatattctgaacttatagaagtcattcttcttcctccatttcaaccatcgacacttcatcgagcagatcgccaaaatcatttgattgctttttctgtctttgctgtctctgcccctcttgctgctgtttctgttcatcagcaagctggccgtatatcggctgatccccgctttggaccggaagagtaaaacggtcaatttggacggccatattcggcaatgattgcttcagctgaggaagatgctgttcaagcaattcttttgctgattggctagatgctatgattttactctgaaacattccattttcatttgtcagcttgattgtgacaaatcctaaatgttcagggttcagccgaatagtgaaacttcccgtcgatctgccgaaaggcgtatatttcatctgcttccacgcattaatcacttgatcagccaccgtttttgtttcggcatttggtatatcagatgacatctgctgcagatcaagtgtttgaactcctcctatgccccgataccccgaaaacagcatttggagtcctgatttactatctacaggctgaatacttccagaaacatccgatgcatttttgctggatgaactctgcgagagcggtgtgagaacactcttcccaaagtcttgtgatgattcggatgatttcgataacaagaaggctttcagctggctttcagctaaactccattctttggtccctttttgaggaagcatagacatttgatccattaagctttgaaaacttttcagctctgacgctgtcatcgagtaaagttttgaacttgactcagctttagtgaatatttgctgtttaagatcctgaattagttgttgagatacacccttcttttctaatgcagaaaggaattgatctccattttggtaaatggcatgagcttcattgccattcccgagatcagtcagcttattcccttctacgagctggctaatgaacatctggatatagataagctcttttgcaggctcggatacttcattttcctgatttgattgctctttatcagacttcagtgctccattaatgtcagaagcagaatcattggcactcagagccgttttagcttctgaaaagattttctccgtttctgtgagcaattgatccgtcccgcctgacatttttgattcaactgcttgcaaaagattttgcaacatttgcagagcattcgcatccaattgcttccctgtcagtttgcttaatgtttgcaaaagatccgcattttgtttgtcttgatcttcaggacttgcatttagccattcaccgatctttttaagcgcatctgctaaaagctgatcttcagaattaggagttccctttccttgttctgaaagttccttcaatccagcctcagacataagccagttttgaaaaactccctggctacttttcatgtttttagcggcagaacccgttgtggtttgcagcaaaggtccggctaattcaagcagcttcacctttcattccccctattcttggctggcagcaattttttctgtataggttgctgcttgctcaggagtcattttcgccaatatgtcagcaagctgctttttgcttaggccattcaatattttcagtgcttcttgctcctttaattgggcaataattttagcagcctttccgctgtccatgcttttgtacacactgatcactttgtcattttcagaagaagctttcgagtctgctgatccttcagtatgatcttctgatgactttttttgatcctcagccgtcttttcaagtgaacggatcttttgattgagcctgtcgatttctgatttacttgtttctaaatctttattcaatatactgatttcacttttttgatccttaatggtcttttccagagctgccgtattactgctatccttacttgatgctgcgccttttttattttcggtttcagggaccaattctttaagaaccggcgtttttgccgcagcatcctgtatcggctttaagacattgataccagcagcccaaagaacaatcccccctgcgattaatagaaacatcagcgggaggataatgataagcaaaaccgaacggaacttacctgattctttctttttgccggacattacattcgctcctaatggccttgaatcataaactgcttaatcgaaatatcgtccatttctttcatttctgcagctttatcttcaagagcaaacattttaaactgtttttcacgcattttttcaaactttttcacttcaatgtttttctctgtcaaaatttcttgtttttgattcatttgatttcttttcataatgacaagcttttgatagtgatagatcgtattatcaagatttgagacaaattgttggtagtgcctcatttcttgtacactcatgccgctttttaatttcttttccttattttgttccagcaattcctttttgctcatattctcatataatttttcagcaacgttttcaaattcagaaactgattgctgatattcggataaggattggtctttttcattttcttttagttccagcagcttttggaatctaaattgataagccacgtttattcctcatttcctgtcaaactagttaatgcagcaatgctttcttccaataaagccggttcgtctgttccctgctttaaaaattgaataagctgcggataaaattgtatcgcttcatcaatttctctggatgatcctcttttgtaagctccgatattaatgagatcttccgaattttgatatgtcgataaaagttcacggaatttatttgccgcatccagatgctgttttgttgaaatgtttgacatcaccctgctgatgctttttagtacgttaactgcaggaaactggcctttattggcaagcgccctgtccaacacaatatgcccgtctaaaattccgcgtacggtatcggcaatcggctcattcatgtcatccccatctaccaacactgtataaaatgccgtaatggttccatgctcgtttgcacctgttcgttctagtaaacgaggtaaaatagcgaacactgaaggtgtatagccttttgtcgtcggaggctctcctgcagccagtccaatctctcgctgcgccattgccacccttgtaacagaatccatcataaacatgacattttggcctttatctcggaaatactcggcaattgcagtcgctgtatatgccgctttcaatctcattaatgctggctggtctgaggtggcaacgactacaatcgatcgtttcagcccctctttccccagatctttttcaataaactcccgaacctctcgtccgcgttctccgacaagtgcaatgacgtttaagtcagcctctgtctgcttggcgatcatccccattaaggtgctttttccgacaccgcttcctgcaaaaattccaatccgctggcctttaccgactgtcagcaagctgtcaattgatctgactccaacacccatcttttcacggataggcggccgtttcatcgggttaggcggtgattgctccgttgatacaggcgaaagccctttcggcagaagctttccgtcaagcggttctccaaaagcatcgatgacttgtccgatcagtccggtcccaactttaacccgaagtgattccccagtagcttctacaatgctgccaggtgcaatgctcgcagcctctaaataaggcataagcaaaatattttcttcctggaagccgactacctcagctttaatgactttcccagactgtccttttgcataaatcaggcacaggtcaccaattgagcttgctggcccttttgattcaatcatcaagccgattacccgcttgacttttccgtaccgtttatacgagtctgtcatttctatacaatctatcagactctgtgtcttcattcagctgcacctgcttccagcgctgtcagaagtttatctttcaattgcatcaattgtgtgtcaacactcgcatctaccctgccaaaaggagtttcaatataacaggttcctttttgagctttttcatcagcatatatgccaagccgacattctttataaagaagctgctggatttcatctttttgctgaaagattgtctcatagtaatatggatcaacataaattgatatatcgtcatattccttcacttcgtttataacctgttgtacaagcaggaggaaagcctctttatcatcagacttttgctgccaaactttttttgctagggcaacggcaagctcaacgatttcttcattagcgtcttcaagcttgtcctcaacagcttttctggacatttcagttatactgtttgcttggccgatcagttctgcatactgtttcattgcctcagctttgcccagcgctactccttgttcaaagccctcggcttttgcttcttcaataagcttctgtttttcagccgcccaatcgtttttctcctgttcaatttgacggcgaatattttctatatgactgtttgcctgctcagaaatccggtcagcttcctctttcactcgggccataagcgcctccgggttctcttcagcctgcaaaaggtgagaatgatcaatacgcacctcttgtatagaaagttttcttttttccttttgtggagaaatagatgattcttgtttaatgatattagacaataatatcatcccctccgcctcttgctattacaatttcaccggcttcttcaagctttctgacgatgcttacaattcttgattgagcttcttctacatctttcaaacgtacagggcccataaactccatttcttctttgaaggtttcaaccatacgctgtgacatattgttgaacacaatttctttgacttcctcgcttgcaacctttaatgaaaggagcaaatcgtcgttctcaacatcgcgaatgactctctgaattgcacggttatcaagtgtgacaatatcttcgaagacaaacatccgctttttaatctcttcagcaagatcgggatcctgaatttccaatgaatccaagatcgtcttctctgtccctctgtctaccccgtttaacacttccacaacagcttcaattccgcctgtttgtgtataatcctgagtaaatgcagaagataatttttgttccagaatccgttctacctcgttaattatttctggagacgttctatccatgaccgcgattcttctcgcaacctcagcctgcacttcagggttcagctcggataaaatttgcccggcctgcactggatctaaataagacaagattaacgccatcgtctgcggatgctcttgctggataaaattcaaaatttgttctggctccgcttttctggcaaaatcaaatggtttaacctgcaaagaagaagtcagcctgtttagaatgttctccgccttatcctctccaagcgccttttccagaacttgtcttgcatagcttaaaccgccttgagaaatataatcttgcgcaatggctatattatgaaattcttctatgatttcatcctttttttgatgatcgacgcttcgaacacctgatatttccagagtaagcctttcaatttcttcatcggttaagtgcttatagacagaagctgacacatctaaccccaaggaaatcatgagaatggctgctttttgttttcctgtaagcttatcttgatcacgtctcgccatttctaattcctcctaatcctcggccagccagcttctcagcagttttgcaaaatcttccggcttgtctttcgccatcttttcaagctgttttcgtctgactgattccgctgtttcattttcctcttcgttgatatcaggcaaattgattggttcttgaggaacctcatactcatattcctcaaattcatcctcttgcgcccgtttctttctgataagcataatgatcagaacaatgatcgctgcgattaaaacaccgcctacaatatatgcccacagcgggatacctgaggattcttccgtatttgtatccaaattgacttttccgtcgaatggctgaacggaaacaacaatcttattattgatatcagcatcagataaattctgattttgcgtttcatctttatccaaagatgttctgactacagttgaaaggattttttgtatatcatcctgtctttcagttgatagcgacgcagtgtttttggcatcaggcggctctaccattacttgaatccctaaatctctgaccttataaggactttcagcgatttctttatgaattcggttaacctcgtaattgattttgttgctgtttttttcgtagttcccgctttcggtattttcaccgtcagccttataatttgtaacatcttcctcgccggttccggcagttccgccgttggctgcaccgtcgccctgatatgtttcagataccttttcagcgctgactgcaatgccttccatgttttctttatccacaggttcgacaatgtcttctgtccgattttcttttgtgaaatcaatgtctgctgtaacggagacaacgactttatcttggcccatcatcgtacccagcagtgactgtacatgtttttgaatgtctttttcaacttgagacttaattccttgctgagaagaataactatccgcgtaggaccctgcatcgctgtctgatttgtcgtagtatgtagaattttggtccatgatgacgatgttatcttcttttaggtttggcacgcttttagataccagatgatataatccgttgatttggctttgatcaagtgtataacccggttgaatctgcaaaacgattgatgcagatgctgcagattgctcttcaccgacaaacacagcgtctttcgggagattaatcattacttttgaatttttaataccgtccatttcattgatcaagtttgacagttctgtctgtgtagctttcactttcaccatatcaaactcattgtctgtcaaaccaaagccggcattctgtccaaaaaacgaataatcaattgatcccgttttaggaagtccttctgcagccatctgcactttcaaagaatcaacctgatcctccggaacactaatcactgtaccgccattcgaaagttcgtttggcacttttttttgcatccaattcttctttgatttgtcctgcttcttcggcagacaaatctttgtacagcggcgccattttagaatttgaagcaaaaacactaataataattccaataataataattgccgctaaagcactaaccattaaaatcttttgtaatttagatctatttttccaaaactcactcgttttgtttttcatttgcattagagtacgattcatgttaacccccggtcattccactctttctctaaatcgtcagaccccctacatttgcattctcataatctcctgataagcttccacagctttattgcggaactctgttgctgcagttagagagatgctagctttttgagcagcgatcatgacctcatcaagatttacatcttttcctgcagccaaggcattagtcatgttgtcagaagctacttgggactcatttaacgaactaatagagttttttaaaagctccgaaaagcttgtttgatttgaagaatctgttttttggctattgtttacttgatttgttgcattttgagtgttttgagtattttgaacctgaaaaggagaaattgcattaatcacattcattcacctactttccgatttctaacgccttcatcagcattccctttgtggcattcatcgccgtgacattcgcctcgtatgatctagtgctgctgacaagatcaaccatttcctttaatggatcaacattaggcttttgtacatatccttcagcgtttgcatcagggtctgtcggatcatagacaagattaaaatccgaatcatcctccgtaatttttgaaaccttcacaccgtttccagcattcccgcttccgctcatttgagaattgagaatggaagagaacgattcaccttttgactgaagggaaaccatttttcttctgtaaggcacccactctccattcacctgcttagctcttgtcgtatccatatttgctaagttagatgatacaacgtccattctgactcgctgagctgttaaagccgatgctgaaacatttaagctatgaaaagctgtcatcattttcctcctgttaatacggtcttcagcgaattaaatttaccgttcattctttcaaccaaagcttgatagttgatttgattttgcgccaattctgtcatctctttgtcaacatcaacattgtttccgttttgctgatacgatgtatctccgctcgcaacaattgaataattcgaatcagtatcagaaaaatcaacatgacgatagtctgtttttatcgcttcaagacgcgaggattcttgatctaataaattttggaaagagactttttttgccttatagttcggtgtatctatattggcgatattattagttatgactttttgcttaatatccgctctgctcaaggcattttcaagattttgtatcgttccagaaaataagctcaaatccacttacctccatttcagtttttttcaccctcaatatccttgtcgagaattgtaaaactatatgcttattgtaagaaataacaggcataaagtctatgaagttcgtgtaaaaaaatgtcctcacaattatctattttgcaactaggtataaagtcctagattgttagaactacatttctcgccttgatataagcctgaaaatagcagaatttctgttttttctcctttcttttcggcatttttgaaactttttgaagaaaaatgcaaaatttattaaaattattacatagaaagactttcaacccaggaaataaagcttattgatttcctttatttgaaataaaaaaagaaccctcaaaaagggttctttttgtgattaatgagattttagattttctaattcaattaggaatttgttgtttagtaccttgatataagtacctttcattcctaatgatctagactcgataacaccggcgctctccagctttctgagtgcgttcacaataacagaacgggtaatgccgacacggtcagcaattttacttgcaacaagaagaccttcatttccgtcaagctcctcaaaaatgtgctcaattgcttcaagctcactgtaagaaagcgagctgatagccatttgtacgacagctttgcttcttgcttcctcttcaatttcttctgctttttctcttaggatttccattccgacaactgttgcgccgtattcagctagaattaagtcatcgtcattgaattgatcttgtaaacgcgaaagaataagtgttcctaatctttccccgcctccgatgatcggcacaattgttgttaaaccagcttgaaacaggtctctgttctcaacagggaaagcagtatattcactattaatatccaagttagaagatgtttcagggacattaaacagatttttcgtatattcttcagggaattgacgatcctcaagcatttttttcatacgatcattttcaatttgctggttaattgaatacccaaggagtttccctctgcggcttacaacgaaaatattggaatcaattacatcccgcagcgtctccgccatttccttgaagtttaccggtttccctgccgcagcttgcagcatggagttaataattcttgttttttgtaataaagccatgataaataatcctcctaaacattcctcatattaaatttttcacaatataaattgacttaaatctttgtttttggctatcgttccgagcttttcttcgacatactgtggtgtaatcgttattttctccatcgttacatctggagcttcaaacgacaaatcttctaataggcgttcaagtattgtatgaaggcgtctcgcaccgatattatctgtgtcctggttcacatgataagcaacttcagcaatcttatgaatagcttcgtcagaaaattcaagagatataccttctgtctgcaataatgcctgatattgtttcagcagcgcattatccggctcaaccaaaattctcacgaagtcgtctaccgtgagtttgttcagttctacacgaatcgggaaacgcccctgcagctcaggaatcaaatcagacggtttggccatatgaaacgctcctgctgcaataaataatacatggtctgtttttacagaaccatattttgtgacaacggtagaaccttcaacaatcggaaggatatcccgctgaacaccttctcttgaaacatcggcagaagaagatgcaccgccgttctttgcgattttatcaatctcatcgataaagataatcccgctctcttctgctctctgaacagcttcctggccgacttcatccatatcgatgagtttgcttgcttcttcattcgtcaggacttttctggcttctctgactgtcattttgcgccgcttctttttctttggcattaatccgctcagcgcatcctgcatgttcatacccatctgctccatacccgagccctgcagcatgtcaaacatagaaggctgctgttcttcgacttctactgttacatagtagtcttcgagctctcctaaagccagctgatgcgccattcgttttcttttttcttcgatgtttgcttcttcctggctctccgcctcatcttcaccattcggctggctgcctccaaaaaacatttcaaacggatttttaacaccagattgttttttcttcccaggaactaacagacgaacaatgcgtttgtttgcattttcttctgcctgttcctttacttcattcattttctcttcttttataagccgaacagaagtctccacaagatctctgaccattgattcaacatctctgcctacatagccgacttcggtaaatttagtagcttcaattttgataaatggcgcacctgaaagcttagcgattcgtctggcaatttcagttttcccgacgccggtaggacccatcattaaaatgtttttcggaacgacctcgtccttcagcttttcatccagaagacttcttctatagcggtttcttaatgccacggcgacagcttttttcgcattttgctgaccgacaatatattggtctaaccgatctacaatctgtctaggagttaacggttttttttccatgcgcctcaagtcctttctattcaagctcttccagtatgatttgatcgttcgtgtaaacacaaatttcgcctgctgtttctaacgcggctctggcaatctcacttgcagacatgctttccccggcatgctttttcagtgctcttcccgctgccaaagcgtaattgcctcctgatccaatcgcgagaatgccgtcatctggttcgatcacctcgcctgttcccgatacgagaagcaaagtatcctgattcataacaatcagcatggcttcgagctttcttagcactttatcactgcgccattcctttgcaagctcaacagccgcccgttttaagttgccgttatattcttcaagcttagcttcaaacttttcgaataaagtgaaagcgtctgcaacagatcccgcaaaaccagcaagaactttgccgttaaacagttttctcactttccgtgccgtgtgtttcatgacaacagcctgaccaaatgttacttggccgtctccggacatagcgcttcgtcctttatgctgtacggcaaatattgtggtcgcatgaaaagatgacataaagggcctcctttaatttttcttaaatgctcttggatggtgagacatatatgtgtttctcaacatttccttcgaaacgtgcgtgtatatctgtgtagaagacagattggaatgcccgagcagttcttgaacgcttctcaaatccgctccttcatttaacagatgcgtggcgaacgtatgtcgaagcatatgcggatggatatgtaaagtgcttgacgctttttgaacaagcccgcttaaaatatgtctgatgccacgggctgtaagcggtccgcctctttgatttacgaataatagatcatgaggttcttttgccttcatcagcaagcactgtcttccgctattcatgtataccttcaacgcttcgcgggcataagacccaaaggggatatagcgctgcttcttgcctttaccgtgaacaagcacagtgtccataaataaatcaacgtcgttaatagttatggaacagcattcactgaccctcattccagtggcatagagcagctctaacagcgcttgatccctcattccggccggctggcttatatctgaaacttcaaacagctcctcaagctctttttgatatagaaacttcggtatccgtttctcctgttttggcagatgaacaagctgaaacggattttcttcaataagcttttcccgcatcagaaacttataaaagcttcttaatgcagatatctttttgcttattgttcttctcgataaacctttttcataggcttctgtcaaaaaaatcctagtatcttgatatgcagcttcttcaaatccatttataccttgaacgcgcaggaaagtctcgaattcttcaattgaatccacataattcacaatagtatattgtgaataatttttttcaatttgtaaatattcaacgaataactttacgaaattcttaacattctccatgcctaatacctccccaggaagggcttttaaatggtatcacaaatcgcgctcaggttgcaatcaatacctatattgttttcgaaattgtttgaattgtttcaatcgcacggttcgcgtattgttcatttcgttcttttttatttttaattttaactggcaattctttcaaaagcccaaagtttgcattcatcggctggaagttcttctggtttgttgttgtaatataatgtgccatactgccaattgctgtttcctgagggaagatcacaagctcttctcccaatacaagcttcgccgcattaatgcctgctacaagtcctgaggcagctgattccacatatccttctactcccgtcatttggcctgcaaagaacagatcactgcggtttttaaattgataagtcggctttaacaggcttggagagttaataaatgtgtttctatgcatcacgccatatctgacgatttctacattttcaagtcctggaatcaacttgagaacttccttttggtctccccattttaaatgtgtctggaatcctacaatattataaagtgttcccgcagcatcatcctgtctgagctgaacgacggcataagggcgttttcctgtaacaggatgctctagaccaactggtttcatcggaccgaaaagcattgttttcttaccccgttttgccatgacttcaatcggcatgcagccttcaaagaaaatctctttttcaaattcttttaacggcactgtttctgctgatgttaatgcttcatgaaaacggtcaaactcttcttctgtcatcgggcagttcaaatatgctgcttcacctttatcataacgggatttcaggtacactttatccatatcaaggctgtctttttctacaattggcgccgctgcgtcataaaaatataaatagtcctctccagtcagctccttcagctgggcagacagcgattcagatgttaacggacccgttgcgatgatagtagggccttcaggaatttcagtcacttcttcattaataacggttacgtttggatgatttttcacccgatttgtcacacttgcggcaaattcatgacggtctactgcaagagcgcccccggcaggcaccgaacattcgtcagccgcagcgataatggctgaatcaagcgcacgcatttcttcctttaatacaccgacagcgttagcaagtgtattagagcgaagagagttgctgcagacaagctcagcaaatttatctgtatgatgcgcaggcgtttgtttaactggccgcatttcatacaatttgacttgaatcccacgtttggcaagctgccatgctgcttcacttcctgcgagtccggctccgattacattcactgtttgttggttcatctttcacatctcctagtttattattcaaggccttcttttaacacacaaagaaggtgagcaagaccctgctcaccgctacttctgtggttcttccttataatcgcattccacgcattggacttgtataccttttttgagttttttctcgacgagcatttttccgcatttcgggcattttcgttcaattggtttgtcccatgatacgaattcacagtccggataacggtcacagccgtaaaacacccgtttctttttcgattttcgctcaacaatgtttccttctccgcagctcgggcacttcacaccgatttgtttcacaatcggtttcgtgttccggcagtcagggaagttggagcaagctaagaatttaccgtaccgtcccattttatataccattggagaactgcacaattcacaatcctctccagcatactctggttcaatctcaacttccttcatttccgattcggcttttttgacgcgtttttcaaaatcggtgtagaaattatcgataatcttgacccattcggtatttccttcttcaacatgatcaagatctctctccattttagctgtaaactcaacgttaatgatctcagggaaaaactccatgatcaagtcaagaacgatctgacctaattcagtcggaacgaaacgtttattatccaatgccacgtagccgcgccgctgaatagtatcaagtgtcggagcatatgtggatggacggccgataccgcgttcttcaagggttttaacaagccgggcctcagtatatcgcggaggcggctgggtaaaatgctgctcaggttctatatcttttgataataccgtgtcgccttcttgtaagtcaggcagcatccggtctttttcttccatttgatcgtcttttccttcaacatacaccttcataaacccggaaaacttgactttacttccatttgcacgaaatgtcaaaccgttgtttgtcaggtcgacactcattgtatcgagaacagccggtgccatttggctggcaacaaaacgctcccaaattaatttatacagtctcatttggtctctgccgaggactgcttttaattcacttggttttctaagaactgatgtcggccgaattgcttcgtgggcatcctgggcattttcattctttttcgcaggcttccgttttccgcctaggaactcttttccatatgtctgatcaataaatgcagctgcttcatcaacagccgtatttgaaatacgggttgaatccgttctcatatacgtgatcagaccaaccgttccttctcttcctaaatcaattccttcatataattgctgtgcaatcatcatcgttttcttcgctctgaaattgagcttgcgagccgcttcctgctgcagggtagaagtggtaaaaggcaaagcaggattacgtttgcgttcctttttggttactttttcaactgtatattgattccctttgagctgagaaagaatctcttttacatcagcttcactatttaaaggaagttttttgccgtttttcccgaaaaagctcgcttcaaaggtttcttgaccttttaagaacgtaccgtcaattgtccaatattcctcaggcttaaagtcgttaatctctttttcacggtcaataatcaaacggagggcaacggattgcacgcgtcctgcgctaagcccttttttgacttttttccataagattggactgattttatatccgacaagcctgtctaaaatacgtctcgcttgctgtgcatccactaaatccatattgatcatgcggggatgcttaaacgattccttaatagcgtcttttgtaatttcgttaaacaccacacggcagtctgagttgagatctaaatcaagactgtgtgccaaatgccatgcaatcgcttccccttctctgtcggggtcagctgcgagatacacttttttggcttttttcgcagccgttttcagctcttttaataccgggcctttacctcgaatggtaatatatttcggttcaaaattctgttctatgtcaactcccatttgactttttggaagatcccggacatgtcccattgatgcttttactttatattttttacctaagtaacgttcaatcgttttcgccttagcgggcgattccacgatgactagataatcagacattttcatccccctcaagaggtgttctctctcttttcaagatatttcaattttatttttgcagctgtctttatttggctttcaacatttcattctttatcatgaacgtcattaattaaatagaaaacaatatgcaactttaaatcctcactattattaaatattacaataccgtttgtcaaacgataattcaaaagggttccgtatattgaacgtttctctcaggaagttcctcgaaaatatcctctgctgaccatatggctttagccccctgctggatcagttttataggacctccggcgtaagggtcaaacaatgaaccgggtacggcaaatacctctctcccttgttccaatgcttgataggcagtaatcagcgaaccgcttttttctttgccctgaacgacaataacgccttcacttagtccgctgataatacggtttctcatagggaaatgccatttttggggtttagtttcaggtgggtgctctgacagcaggatatggtgtttagccatgtgatctgctaactgaaggttttctcggggataaatgtgttgaaatccgcctgcaatgacgccaattgtccgccccttcgccttaatacttgcagcatgggacattccgtctatcccagacgccagtccgctgacaatcacccaacctttacgacagatctcttttgtaagatgattgacaacttgtttcccataagctgttggatttcttgtgcctacaattccaatttttctccctttcgaaagaagagtcatatcaccttttgcaaacagtacggcagggggatcataaatgcttttaagccagaaaggatattgctttgaagaaatagggatggtgttaatgccttgctcacgataagcagcaagtacacgcgggagctttggataaaattgttctatttcgttttttaatgcagctgcttttatttgatcacgagtaaccgtttgtaacacgggtgatgtcagcgacatagacggatcggctttccaccattttaatagaagggatggggataataattgattgattctgcaaatcgttaggcagacagcggcctgatccaatagattgacctccttttgttagaaaaagcaggaacagccttgacggctgtcccttttttattaatgcgttttacaagtttcgaacaagttcttctctttcagcaccttgattaaggtttcacccatgacagaaggtgtctctgcaacttcgattccgcatgcattaagggttttgattttttcatcagctgtccctttcccgccggaaataatggcgcctgcatgccccatgcgcttcccaggaggtgctgttttaccgccaataaaaccgactaccggttttgtcatgttggcttttacccactctgccgcttcctcttcggccgtaccgccgatttcgccaatcatgatgactgcgtgtgtgtcaggatcttcgttaaacgcttttaaaacgtcaataaagtttgttccatttacagggtcgccgccgattccaacagctgtagattgccctacacccgcttctgagagctggtgcaccgcttcgtatgttaatgttcctgaacgtgatacaacgcctacatgaccctttttatggatgtatccgggcataatgccgattttacattcttcaggcgtaatgacaccaggacagttcggccctatcagtctcgttttcttgccttccatgaagcgtttgaccttcaccatatccaaaaccgggatatgttctgtgatacaaatcacgagatcaagctccgcatctaccgcttccataatcgcatcagctgcaaacggtgcgggcacatatataacagacgcgttagcgccggttgtttgaactgcttcagccactgtattaaatacaggaacaccttccgcttctgttccgccttttccaggtgttacaccgccaacgatatttgtgccgtattcaagcatctgcttcgtatgaaataaagcggtagaacctgtaatcccttgcacaataactcttgtatctttattaatgaaaacactcattatttggtcccctgcctttcattctttcttaaactaaggatacgattttctgcgcgccgtcagccattgattccgcagatgtaatgtttaatcctgattcactaaggattttcttccctagatccacgtttgtgccttcaagacggacgacaagcggcaatgtcaaaccaacttgtctagtcgcttcaacaaccccttctgcgatgacatcacatttcataatgccgccgaaaatgttgacaaaaatccctttaacgttttgatcagaaagaatgattttaaatgcttccgtgactttttccgcggttgcaccgccgcccacatcaaggaagttggccggttctcctccataatgcttgataatatccatcgtagacattgcaagtcccgcgccgtttaccatacagccgatatttccatcaagggaaatgtagcttagatcatatttggacgcttcaatttctttcggatcttcttcatccaaatctctgtattccataatgtccttttgtcggtacaacgcattgctgtcaaaattcaattttgcatcaagcgccatcacatttccgtcgccagtcacaacaagcggattgatttcggcgattgagcagtctttctcaacaaacgctttatatagtccaagcataaatttagcagcttttcccacgagctcttttggaatattaatagcgaatgcaatttctctggcttgatagccttgaaggccaacagctggatcaatgacagcttttttgattttttctggtgttttctccgcaacctcttcaatttccgttccgccttcttcagaagccattaaaacgattcttgaagtggcgcggtcaagcactagaccgatgtaatattcttttttaatatcgcagccttcttcaataagtaagcgttttattacttggccgtccggacccgtctgatgtgtaactagggtcttccctaatagttcttcggcatacgcttttacttcgtctaatgattttgctatttttaccccaccagctttgcctcgaccgccagcatgaatttgagcctttacgacataaaccgagctggataagctctttgcactctcaactgcttcttctgctgtaaaagccactttaccttcaggaacagataccccatattttctgaggacttcttttccctggtactcatggatattcatttcccatcctcctaacttatgtaacaaaactaaaatagactgcgctttcattctataataatactggaagaattgtctacagttcgatgcaaaatcttttaatccttctaaacattcaaacttttactttattaaaaacataaatttcaaagaaggatggggaatattttagctattttttgttttttacgctttcgtccaatttgtaaatgaatgaaaaaatctcggctaccgtttcataaagagcttcaggaatttgatcatctaccgtcaaatggcgcattaattcgacaagggtccgatcttcttgaatcgggacccctgcttttttcgcttcttttataatgttgtcagctacatggcccttccctgtggcaatcactctcggcgccttgtctttttgttcgtcataatggagagcaacagcttttctgatcggtgtctgctctttcatattttcacatccacttcctgatcactgatacttgttatatattgatcgattgaagccttttcttcggtgtgaaccctttttttagcgtttacccctgaaaggctgtaccccatttcctttagcccctgtttaagcgcgggcaccatcggatcgatcgcagcctgcagctcgaaatcagtctctattgtaatggtcatgactttttgctgtaccaagcaatcaacgacggtttcttttagtgtatcaagctgcagcaaaaacaaaaggcggcaatgggaaggatcaagctttccatccgcttctttctttcctttaaacagaacagtcatgtcctgaacccctgacttcgaaaacatcggaaatgacattacaatttggctgtatgatggatggtcctgctgcatgaaaagctggccatttaatttatgaaaaagctgatcggcttcttgtttgactggttcggctacctcatgcgatgctcttaaggcagaaagagccagcttgatggattgcatttcgccagatgtgactgcgcttccttgttcaaacgctttaatgaacgcaacctcgtcccttgcgccgattgccgttttcactttggataagaaagaaagaacatctgccttatccgccaaatggggtgctgtctgctgaacagcctttaaaaagacttcggcttcctgatctgtgacttgtgccgcctgtaaaacagctgaagctgcaagtgacttactatcacccgatgaagcagccgctttaatccaatttgctgcttctttcacaatttggagactgtttttttcagcagattccgtcagcttcaccagcagctggcgggcttctttaattggaatgtctgctgctgttttaacaggctcttcttgtatgcttccctgttctgctgtgtgatttgcaatcggcaggctggcttttccgggggagccagctggtgtgctaagctccctgcttccagctgtattcgtcggagaaggtgctttcgtattgtcggttaaagaaataagcttatcaatcagccgttctgcatggacatcgatttcactatttaaaagcaccgtgactgcttcctttagctttgacatcatttggctctgctgagggttttggtcgattgcctgtagcagctgggatacgtgctgatgcaacggaacaggcgatttcacagcgtgaacaccattcaaaatctcggagtgaatgggaagatcacgctttaaagcgaagagaaccgtttcaactgctttttttgtgtcttgcgaaggcagcgtgtccatccagcggacagctgttttgatatcattttctgttacgggtgttttgcttttcagcatcgctcctgtcatcatgagagctgcgtttgacgtcttcactgaaatagcatttaaaagtttgccagctgcatcctgaatggttttaggattttgatcaaagctttgaacgacctgaagacggcctgtttgctctgccgtttttttttcgtaggaaaaccaatagtatgcctgaggacgaagctgagtttcaagttttccctgaacagtttgattgccgacttggatcagggcatgctgatctcctagtaaacgaagcacttttcctaagaggagacgcttctccccgtttagcgcttcgtttacttttgatgtttcctgcgggacggctgtacgcccgaaaaggtgctgcagcgccttttgcacatcatttcgtatgttcattttaaaaaggtgcctccttgtccatggtgatttatctgaaagattgaacaggagcgaaagttttgcggtgcaattcagttgggccgtatgcagcgagagcttccaaatgttcttttgtcccatagcctttatttttttcaaagccgtacatgggatacgtttcggcataagcgctcatcattcggtccctcgtcacttttgcgatacacgcacctgccgcaatagacacgcttttggcatcgccttttataattgacgcctgagccgtgtcgagcggaagtgtcattgcgtcaacaagcaaataatcaggtgtatccgacaaatcctgtatcgctttcaccattgccatttttgaagcttcatatatattgatctcatcaatcacagtagcttctacaattcctatcccgaccgccagtgcttccttcataataagctcgtaatattcctcgcgttttttctctgaaagctttttggagtctgtcagcccaagtatttcacattcctctggaaggatgactgcgctggcgacaactggtcctgccaatggcccccggccgacctcgtcaacacctgcaatcaagcgaaatcctttgtttcttgccagcctttcataggaagtcatattcacccattgttctttcagcgctttttctttcgcttgctttttaagccattgctctacaagcgtttgaacgctttttctcgggtcgttttcgcattgggcaataaatgggtcttgtgcatccttcacttcctgcaaacggtctttaatgtcctttacggttaatgtattcactttctcttctcccttactgtatgtatcggttcagccaagaaaaaataaagacccgcatttctgcgcgcctttacatcgtcggctgttcaaatgacagcctgccgaacttttcagtgcgaatatcgcgaatgatgacttcagtcgtcttatcgtagttgatgagcccaccgctcatgagacagccccgcttttcacctattgcatcaaacagctcggcaatgtcctctgggatctcatcaaggccataacgctctttaagccgttctgggtaatgttcttcgagaaaacgaagaccaaacacggccacgtcctgcaaattgataatcgagtctttaatagccccggtgactgccagtctcaaaccgacaagctcatcctcaaatttaggccacaaaattcccggtgtatctaatagctctaattctttcccaactttgacccactgttgagaagtcgtaataccaggtctgtctcccgtttttgctatgtttttctttgcaagccggttgatgagcgttgattttccgacgtttggaatgccgataatcaaagcgcgaatcgctctcggcttcacacctttcgcacgcatccggtcaaatttttcttggaggatctcttttgatgcaggcacaatttgatttaacccttgtccatttacagaattaatagacagagagcggatcccctggttctcaaagtgctctttccactgctgtgtaactgccgcatctgctttgtcagccttgtttaacagcataattcgcggcttgttttttagaatatcttcaatcattgggtttcttgatgacattggaattctggcatctaccaattcatatacgatatcgattaattttaatttttcggttacttcccttcttgcttttgccatatggcccgggaaccattgaattgtcatgtgacacgaacaccgcctttatcttcagtatgcatgattcattgttgtcctttatgtattttacgatgcctgtccggcattttcaaattctgtataaaaaaagagcttgttacaggtaacaagctcttttcgttcgttatcattatcgtctgatctctttaatacgagccgcttttccgcgaagttcacgcaggtagtaaagtttagcacggcgtactttaccgtaacgtacaacttcgattttcgcgatttttggtgtgtgtactgggaaagtacgttcaacgccaacaccgtaagaaatcttacgaactgtgaacgtttcgctgattccaccaccacgacgcttaatcacaacaccttcaaagatctggatacgctcacggttaccctcaacaactttaacgtgtacacgtaaagtgtcaccaggacggaacgcaggaagatcagtacgaagctgttcttttgtgatatcttcaattagtttttgcatcgttttcaactccttccaacagatgctcttggccacaaaaaccggcacagcggaacatcgttttcaagcttgcagcggataagcccgcttaagccacaagtagtatcttatcacaatttcatagcctatgcaataaaatctattctttttcccattcagaaatccactttctttgctgctctgtaagcgggtagtctttcaacagatccggacgtcttaggtaggtccttctgatcgattctttattccgccattcttcaatttttgcatggtttcctgacaagagtgtttcaggcacttttaaacctttgtaatctgccggtcttgtataatgcgggtgctctaaaagtccggtgctgaaggaatcctcaatatgggaagcctctttacccagtacacccggaagcagtctgaccacactgtctgcgatcatcattgcagggagctcaccgcccgtcagaacaaagtcgccaattgatatttcatccgttaccaagtgctcgcgaatgcgttcatcatagccttcatagtggccgcaaatgaacagcaaatgctcttccttagctaattgttcggcttttttttgggtaaaacgctcaccttgcgggcatacgaggataatacgcggagcagcggctgcctttgatgtcaggtcctcgaccgcgtcaaaaacaggctggggcttgagaaccatgcctgccccgccgccataaggataatcatcaacagtattgtgcttgttatcagagtactctcggaaatttacgacttgaaactgcaccgcatctttttcctgggctttttgaagaatcgatgagccgagcacgccttcaaacatttcgggaaacagcgtcaaaaaatcgattttcattcgtctattaacccttccatgagttcaatctcaattttcttttccctgacatcgatatgtttaaccactgattcaatgtaaggaatgagtgcgtctttttttccttttcgtccgatgacccaaacgtcattggctccaggcgtcaaaatttctttgacctttccgatgagttcgccttcttcagtaaatacttcacacccaataatttcgtggaaataaaattcaccctcattcagctctcctaattcttcttcaggaactttaatgattgcgtttttcagctcttctacttcatttaggttttgtctttctttaaactgcaggagatgaaattgcttatgcagtctatgtgtgtttaccgttacctccactggttcgttacggccgtccataaacaaatacagcgtgtttcccggcttgtatcgttcttcggcaaaatctgtttttgaaatcacccgcacttcgcctttgattccgtgggtatttacgattttgcctacattaaaccatcgctttgtcatatgatcacctctggcgaatttcaattacttttccgtcttttatgacgatggtgttcgctgctgttttctcatgccagtcatccccggcttcaatcgtcagcagcgcatcgacttccttttctttcaactcactgccaagcggcaatgtatgtacttgagcaatttgaaaatcaatgatttttatatcatcttttcgcttttctattgcctttttaaattgttcaatcatattagggttttgctgttctttctcatgttttctaagctgaaaatagagctggctgcattctcgttcaagcatttgtttcttctcagcaaaagaagctaaaagcttttctttactgcgctcggttaagacttgcataacggctacacggtgaataatttgcatcgcaccaagctccccgcttttaaaacttttactcgtccaggcttttctattttgcctaagcttctatcagtttaccctttttttgcgtgtaaaaaaaggggaggtgccggccctctcccttttagtcaaatatttcaaattgaactttcttagaagactgtacgccagctgcaaatacagctgttcgaatcgcttttgcagtccggccttgctttccgataactttaccggtatctgacttatggacagataagcgcagcgcaatcttttgatcggtttcttctcttatgacgcgaatgtcatctggatgatcaacaagcggcgtcacaatgtggacaatcaaatcttccaagtgttgatcagtcattacttgccttgtttagcgttgtggaatttttccatgattccttggctagagaacaagttgcgaactgtatcagatggtttcgctccagtttgaagccatttaagagcaagctcttcgtcaatttttacttccgctggttttgcaaccgggttgtaagttccgactgtttcgatgaaacggccgtcacgtggtgaacgagaatctgctacaacaatacgatagaaaggagatttttttgctcccatacgttttaaacgaatttttactgccattttactagcacctccgaaaatatttcaacaagatagtatattaacaatgataaaagtgtttgtaaagtgttttttcttaacaacggttttatcatgtataaccgattacataaaaggtagcttaaacccttttttcttgccttttgacatgtttgtcatctgcttcatcatttttttcatttcatcaaactgcttaagcagacggttgacttcctgtacggatgtcccgcttccttttgcaatccgcttccgccggctggcattgataatatccggctgttctttttcaagaacagtcattgatttgatgattgcttccacatgattcagctgtttttcatcaacttggatgtttttcaggcccttcattttacctgcacccggcatcatttgcagaagctcatcaagcggccccatgtttctgacttgcccgagctgctccagaaaatcgtccaatgtgaagctcatcgttctcattttttgttccagctctttggctttgtcttcatcaacgctggcctgtgctttttcaatcaatgtcagcacgtcgcccatgccgagaatccttgatgccatgcgttcaggatggaacggctctaacgcatcaagcttttcgcccaaacctgcaaacttaattggcgtgtttgtgacagcgcgaatagaaagcgcagccccgccgcgtgtgtctccatccagcttagtcaacacaacaccggttaaaccgagctgttcattaaagcttttggcaacattcacagcgtcctgaccggtcattgaatcgacaaccaggaaaatttcttccggattcgcgatttctttgacgttggtcagttcatccatcagttcatggtcgatatgcaagcgccctgccgtatccaaaatgacgtagtcataatgttcttccttggctttctcaatagcctgtttagctatttctacaggactgacctgatcgccaagagagaaaacaggcatatcaagctgtttgccgagtgtttccagctgcttaattgcggctgggcggtaaatatcggcagcaaccagcatcggtttgcgattatgctttttgcgcagcagattcgcaagcttaccgcttgttgtcgttttaccggcaccttggagaccgaccatcataataacagtcggcggcctttttgcgacggcgattttgctctcttcgccgcccatcagctcagtcagttcctcttgaacaactttaatgacctgctggccgggcgtcagacttttcatgacgtcttggcctacagcgcgttcacttacttttttgacaaaatccttgactactttaaagttaacgtcagcctcaagcagcgcaagacggacctcacgcatcatctcttttacatcttgttcgctgactttcccttttccgcggattttagaaatcgtctgctgcagtcggtcggctaatccttcaaatgccatagtttgccgcctcctaatctaatttctcaagcgcttcaatcagagctgtaatttcttcctcttcttttgaaccggaagcaagctccttcagcttattaaacatctctttacgctcctgaaactttttcaaaaggagcagcttttcttcatattgttcaagcattgcttctgttcgtttgatgttatcataaacagcttgtcttgaaacctcatattcttcggctatttcgcctagggagaaatcgtccaaataataaagcgacatatagctcttctgttttgacgtcaacaacgactgataaaaatcaaacagataattcattctcgttgtcttttcgagtgacatttgagctctcccctttgttaagtcaaatccctttacgataacttagtttacacggttttaatgacactgtcaagtttttatcttgtcaaagcggcgattaacttttccaaaatacgctaaatatcatccaatttattccgatattgtatatgaaccctattttaaggaggatttttatgaaaaaaatcggtttattgtttatgttatgtctggcagccctgtttacaataggtttcccggcacagcaagcagacgctgctgaggcaccttataaggcctcaatcacaaatatcagcacagatggaggggtatacggtaaaatcaattacggacaaggtcaatattggcgagtcaagtacaatattacagtaagcggcaaattactcgaccaaaacggacagccagtgccaaacgcgcccgtaagatttgaagcggacacgaaggtcggaaacacaacacaaactgcttcaggaacgactgatgcaaacggaacatttgaggttccaatgtatttggggccagctgctggttactatacgtattacacatctgtttccgttcattactatgacatcatcccattcagagttttttctggtgagtcaagactggtatccactgataacagcctttatcatttcgcctatcaagtaagaagataaaaaagaaaaaggccccaagatgttggggcctttttcttaatcgtcggctttttccactaaatctgaaaagagtccgtacacataggattctggatcaaattcctgaaggtcatcaactttttctcctaaaccgactagtttaaccgggatgtgaagctcgttgcgaatcgcaaggacgataccgccttttgccgtaccgtcaagcttcgttaaagcaatgccggtaacatttgttgctttagagaattcttttgcctgagccattgcattttggccggtcgtggcatcaagggcaagcagcacctcatgcggagcttcaggaacttctctttcgataacacgttttactttttcaagctctttcatgagatttactttgttttggagacgccctgccgtatcacaaattaatacatcggcatttcttgctttcgcagcatgaacagcatcgtagatgacagccgccggatcgcttcctgccgtctgcttaatgacaggcactcctgtacgctctccccatacttccagctgttcaatggctcccgctctaaaagtgtctccggcggcaagtacaacagattttccttcttgtttcattttatgagcaagctttccgatcgttgttgttttcccgacgccgtttacacctaccagaaggattacgtttaaacgcccatcctggatgttcagttctgaaatttgctcatctccgctgttataaatctcgaccagtttctcagaaatcactgactggacttcctttggatcttgaatatttctgcgtttgacttcttttttcagctcatctattaattccataacggttgtaaaaccgacatccgcgctgataagaacctcttcaagctcttcgaagaaatcctcatccactttacggtaacgggatacaagatcattcactttgttttgaaaggagtttcttgttttttcaaggccatccttaaacttttcagatacggaatctgtctgttttgtgattttctcttttaattttttaaaaaagctcatcttttaacctctttcctcgttactgaacgaattcttttgtttcttccagcttaactgaaattaccttggaaacaccggattcctgcatggttacgccataaagcacatccgcttcctccatcgttccttttctgtgggtaatcacaataaactgagtatcgctgctgtatttttttaaatactgcgcaaatcggaacacattcgcttcgtcgagcgcagcctctacttcgtcaaggacgcaaaacggcactggacgaacctttaggattgagaataagagcgctatagcagtaagcgcacgctctccgcctgacaggaggtttaagttttgcagctttttccccggcggctgagcgataatctcgactcctgaatgaagcagatcgttaggatcggtgagcctcagttcagctcgccctcctccgaataaggagcggaaaacttgatcaaagtgtgagcggatttggacgaatgtgtcgttaaagcgcttcgtcatttcttcatccatttcttcaatcacttggaacaaggtatttttcgcttctgttaaatcttctttttgttccgacagaaacttgtaccgttcgttgaccctctcaaactcatctatgcttccgaggttcacggtacccagctcttcaattgcgagtttaatcagcttcacgcgctttctggcttcctctggatcagtttcaagctgatatttctcttttgccccctcaaaggacaagctgtattcctcccgtaagtattggagtaaattatcaagctcgacttccattcgtccaagtttgacttcttcgtcttttaagagcgttgttttttgtttatacaggcgtttcatttctttcagctcacgctcatacgtatcaagcccatgctgaagcttgatgcgctgatcgcgccttaatgcaatcagttcgatcgttttcgttttgtcattcaatttatgttttgctgcttcttccagcttttcttcgccgctggtgctagatgacatctctgacgttaagaagcttaagtcttcttttgcttcttttaacgcaagctctgtttcagtgagctctttctttaatctggcaaggttgtcctcttcccccttgcaagcctgctcttttttggccgctgcgatcttcagctcagtcagctcgttggagagagactctttcgttgaggattgcgtttgtttttgttttgtcagtctgtctatgtcctcttcaagctgtttcatcttttcagatacggcagagagctcttcttcaagcttgcgtttgcgcacttttctctcttcatcgctttctgacagagcagatttttcttgatcatagagctctaaatgggtattgatatttttctcggcaacttgaagttcgtacagctggcctttcacatcctgctgctttaaccttaagccttccccggtttctcttaagtcagccagttttttctccatatcctgaatggagtgcttaagggttttgacctcttgttcaagcagtgccgttttctcttccatttcagcgagccgtttcgtcacatcttctagctcccggcttcttccaaggagggagttatttttctttttaaccgcgccgcccgtcattgaaccaccggggttcacaacatctccctcaagggttacgatgcggtaccggtgcccgagaagcttcgcaagctcgtttgcaccctttaagtcctctgtgatcagaacggttccaagaagattctggatgacgcttcgatacgcaggatcaaatgtgacaagttcactggcaaccccgagaaatgatgaatgccgggcggctgtttccgcgtcacggctttgaagctggcggtctctaataacagaaagaggcagaaacgtcgcccggccgaaggaattctgctttaaatattgaatcgctttgcgggcagattgttcatcgtcggtcacgacgtgttgagcagaagcgccgagcgctatttcaatggccgtttcatacttctgttctgtagaaatcagctcaagaaccgctccgcgaattccgccaaggcgctctttcgctttcagcacttctttaacaccttgataaaagccggagaaatctccctgcatcgtctcaagcatgtccttttttgatctcgcttgctgaacgtattggtatgcctgatacagagcggattcatttttttcgtattggcgctttttctgctcatattttgtctgcatatcacgatatgcaccgacttgactgtgaatctcctgctcaattcgggcaaattccgtttcacatgcggctttacgcgcagaaatatcatgccgttcctgcaggtgcttttcattgttgtccgcaagtctctgcaatgtgacagcggattgggacatctggtcatcaagaagctggagttcgttgcgtatcgaagcctggctgtttaacagctcaaaataatcacttttcagctgctcgattttctcttcgacattttcattgtgaagactgagagcctgctgtttttcttttacttgcgcccttaactgcttcacctcagcctgaagcgtttcgaagacagcttcctgcttcgaaagctcttctttcagaaccgtttctttttgctggaactgaacgatggcttcttcaagctgttcttggttttgcacagcgtttttctttcgttctttcaggacttctttacggccttcaagcttttccagctcttcactagttaccagtaaaacttgctggagctcatctactgactcatcaagcgcttgtattttgtcccttgtatcctcaatctttgcttctttcgcagaaatagcagacgattcagcaagctcttcttcttttgccatctgcactttctctttaagagtcgaccatttaccatgcagctcttcgatatcataggcagtcagcgcaatttcaacatgctccagctctttctttttctcaaggtagtctttcgctattgaagcttgaattttaagaggttcaacctgtccttcaagctcatgtaatatatcttctacccgatttagattgtcctgtgtctcaaacagtttattttctgcttttttctttctcgttttatatttaagcaccccggccgcttcttcaaagatactgcggcgatcctccgctttgctgctcaggatctcttccactttcccttggctgataatagaaaatgcttctttaccaagcccagagtccataaataaatcaataatatctttcaagcggcatggctgattgttaatcagaaactcactctcacctgatctgtacacacgtcttgtgacactcacctcgtggaagtcaattggcaagaaatgatcatcattatcaagagtaagcgtaacttcagctagatttaatcgctttcttgaatcactcccagcaaaaatgatgtcttccatttttccgccgcgaagagagcgtgccgattgttcgccgagaacccagcgaatggcatccgtgatgttgctttttccgcttccgttcggcccgacaactgctgtcacgcctttaacgaagtctacggaaatccgttctgcaaatgatttaaatcctataacgtctaaacgtttgaggaacatagcgatcctccttatgtaataagtatttcaattctatcataaacattggtcaaataagacggcatacatactgaaatccccctgagtcataagggggattttattgtttcgtatggtgtttttgcaatttagctaaagcttcctgagcagcgtgctgttcggcttctttctttgaacggccgtttccgactccgagtggttcaccttttagagatacgatggcttcaaattcacggttgtgcgcaggtcctttttcgttggagattttatactccagagagcctttgccgtcccgctgcacgtattcctgcagctggcttttgaaatccatcacatgagaaaaagcaccatcgttaattttagggaacacataaacttttaagaaactttcgaccggctctaatccttggtcaaggtacaaggctccgataaatgcctcaaaaacatccgccaatagagcaggacgctttcttccgcctgtcatttcctcgcctttacccaacaggacaagatcgccgaatgacagctcgtgagccaatgaaacgagagacggttcgcaaacaattgcggctctcaatttcgtcaaatctccttcactcatagccgggtatttggcaaataagaatctggagatcgtcagttccaaaacagcgtcacctaaaaattcaagcctttcattatcttcatacggctttttccgatgctcattcacataagatgaatgtgtaaatgcttgatacaaaagcttttcattttgaaagtgaaccgaaatccgttcttgaaactctttaaattgttctacttttttatagaacttttttttatctttataatgtgagtgttttgacatagtaacctccataggcacatcaggttcaccgcgcttctctgactaaaccggatacagcgcgcgtaaaagcggcatgctgtaataactgcacgaataaagggctaaagccccgcgtttcggcgggacttttagcatcagcttattgctggttttgtatgtagttcacagcgtcgccgactgttgcaatcttttcagcatcttcgtcagaaatctccatatcaaactcgtcttcaagttccataacaagctcaactacatctagggaatcagcacctaagtcttccttgaaagaagcttcaagtttgacgtctgcttcatcaacgccaaggcgatctacgatgattttcgttacacgctctaatgtgtctgccatagcaattcacctcccctcaagtattatagtggattcgtttttaaaaaactagagaaactacgatgaaattttcgagaaaaaacttacatcaccattccgccgtcaatatgaagcgtttggcctgtcatataacgagctccctctgaagctaggaacgtgacaacactgctgacatcgctaggttcaccaaagcgcgcgagcggaatttgtttcagcatttcgtcttgaacgtcttttgcaagtttatctgtcatatcagttgagataaatcctggcgctattgcgtttaccgtaatatttcggctggcgagctctttagcagaagatttggttaaaccgatgacgccggcttttgcagccacgtagttggcttgtccagggtttccgctgacgccgacgatagacgatacgttaataatgcggcctgaacgctgtttcatcatttgtcttgtaacagcttttgtgcagttgaaaacacccttcaggttaatgttaatgacgtcatcccattcgtcttctttcattctcatgatgagattgtctcttgtaattcccgcattattaaccagaatgtcaatcgtagaaaaaacagacaatgtttcttttatcatgttttgtacatcttcgggatttgatacatccgcttttacagcaattgcttttctgcccattgatttgatttcatctaccacttcatttgctttcgcttcattgccggagtagttcacgacaacatttgctccgctttttgccagatcaagggcgattgagcggccgattccgcgggatgcgccagtgacaatagccgttttatcattaagcattatcattctcctccttaagcgtttgaattgccagctcgatcgtttccggatctgatacagcaattgtttttaaccgtctattcacttttttcacaaggcctgaaagcacttttccgggaccgatttcaataaaagtcgtaacaccctctgcgatcagcttgttaatgctttcctcaaaacgaaccggagagtaaagctgctcaataagtttttctttgatatctgctttttcagtcatcacgtcagcagaaacatttgagatgaccggaacgtcagcgtcttttatgtcacaggcgtccaatacctctttcagcttttcagcagccggtttcatcagttcagaatggaacggaccgcttacttcaagcggaattgcgcgttttgcgccgttctcttttgccagttcagatgcaagctcaacccctttagctgttccggaaatgacgatttggccaggacagttgagattcgcaagctgtacaaggttgccttcctctgtgactttatcggttacttgctttaatgcttcagcatccatgccgagaatcgcagccattgctccttcgccagccggcaccgcttcattcataaactctccgcgctttctgacagtataaacagcatctttgaaagacagagcgccagccgcaaccagtgcagaatattcaccaaggctgtgtcctgctgtgaaatcaggtgtaatgccagattctttaaatttctcaagaacagcgatgcttgtcgtaagcaaagcaggctgcgcattgtatgtaagtgttaattcttcagcatccccctcaaaaataagcgagctgagttttgtttccaacgtttcatcggcttcatcaaacagacgctttgcagcaggcacctgctcataaagctcttttcccatgccgataaattgtgatccctgacccgggaataaaaatgcaatcttactcatgatgtaaaaacctccagactactcatctgttttttcttctttcacttcttcctgaatgagcgcagccacattttggctgaccatctctcttgcttgccgaatcgcatggaatacagcatttgaatctgaagagccgtgcgccttgatcacaggcgcttttaagccaaaaagacttgctccgccataattcgaatactccattttcattttcatttctttcaattttggtttcagcacagctgctgcaagcttggatgtcaaagtagacgtcattacgtctctcatcattttaaaaattgacaacgcagagccttccagcgttttgagtgtaacattcccggtaaagccgtctgttactacaacatccgccacatcatctaaaaggtctcgcgcttccacgtttccgataaaattgatgtttgctgtttcttttaaaatttgaaacgtctgcttcgtcagttcgtttccttttttatcttctgttccgacatttaaaagtccgactctcggtgaagtgacaccgcgcacttgctgagaataaacagaacccatgatggcatattgaacgaggtgctccggtttggcatcgacattggcgccgacatcaaggagaagaaatccgtctcccgaaacagtcggaagtgtcggagcaagcgccggacggtcaattcctttaattctcccgacaataaagagaccggctgtcattaatgcaccggtatttcccgctgaaatgcaggcgtcagctctgttttccgcaacctcctgcgccataagaaccatagatgagttcttttttcttcgcacggcacggaccggttcatccgtaggctcaatcacttcatctgcgtgcagcaccgtgatgcgatctgatgtagttgttaaatgtgattctatcgttgttttgtcaccgacaagtgtgatatggagatcatcaaatgcctctataccttttataactccgtcaataacagctttgggagcgtggtctcctcccattgcatctacagctattctcatgcatgctccacctttatgaatgttttgaacgatacatgtcaaagcgtccagaaaaaacaatttcttcgccaacgtagctgttcacttcgacaaccgttcttcctttttctttttcgacagccgtcactttcgcttttgctacgacacgttcaccctgctttacctgtcttgtaaagcggatgtctgcacttgcagtcagcgccagctcgtcatcaatgactgcaacggccaaagaattcgcctgtgcaaataaatggtgtcctctcgcaatctgattccggctgaacacgtgctcctgttttatttctaaaatggatatcgcctgatcatccagctcaaggtcaataatttctccgataacttcatcaagtgacagggacttcacttcgtcctcaagtgttttctctgccacgttcttaattctttctctcagttcaggtatggaaagctctaagcggtccaaacgtatcgtctggatgctcaccccgaatttacccgctagttcttcatctgtaataaagggggttgcttgaatcgtctgctgaagtaattcctggcgttctctcttatttcttctcatatctaaacaccatccggacaattaagactaggtactaatagtagtatataatttcatagattggaatgcaacgattgtttctggctgaacaccaaaaacttctgatactcagcttaatttttccccgtccattactccgctcttcagcaattcatctcttaacacagcgtattccggctccttccagaacgcgtcagaagccacaagattcgcagcatcctgccttgccgtttcaagcgctctgtaatcatgaaccatgtccgccactttaaattccggcattccgctttgttttttcccgaagaaatcaccgggacctctcagttccagatccttttcagacagctcgaaaccgtcattggtctccgacatgatcctcatccgttctttccctgtttctgattttggatcagccatcagaatacagaaagattgatgctcaccccgtccaacacggccgcgcagctggtgaagctgtgatagtccgaaacggtcggcgtcataaatcaccataattgttgcattcggaacatttacgccaacctccacaacagtggttgatacgagaatttgacagtgatttgcgctgaattctctcatgacctgatctttttcatcggaatgcagctttccatgcataaggccgacattccattttccccgaaaaatatcagaaagcatattgtacacgtcaatggcgttttgcacatcaagcttatctgattcttcaatcagcggacagatgatataagcctgcctgccttgctttaattctttttcgacaaatgccaaaatacgatcaagcatgtcatgttttacccaataggtttcaattcgctttcgtccagccggcatctcatcaatgacagatacatccatttcaccgaatactgtgatcgctaatgttcttgggattggagtggctgtcataaagagaacatcgggatcctgccctttgttccgaagctttttgcgctgctcaactccaaatctgtgctgttcatcagtaataacgagactcaacgccttaaactccacctcgtcttggattaaagcatgggttcctacaagaatatcaatctcacccgccgcaagacgctcaagcagttcttttcgccgctttcctttaacagagcttgtcaaaagagcaacgctgacgtcccatttttcaaatagcgaaacgagcgaatcagcatgctgctcggccagaatttctgtcggcaccatgagcgctccttggtatccggataggatcgcggcatacagtgcaatggcggcgactgccgtttttcctgatccaacgtccccttgaagaagacggttcattctgtatggagaagacatgtctgctgttatttcgcgaagaacgcgtgactgggcgtttgtgaggggaaacgggaggcttttgataaatctcatgagttcttcgtttgaaaaacgctgccgtatcccttgtgtctgctctctttccgcctttcggaacgcctgcattttcaactgaaacaacaaaaattcttcataaacaaaccgccgtctggcaagctttaatgcttcccttgtttcaggctggtgcattgcttttaacgcttgataatagtcaggcagtttatagctttttcttagcttttccggaagaggatcaggaagtgagtctgcatattgggtcagcgcctgctgaataaagcgcctcatcattttgacggtaacattttctttcacagaatacactggttcaatgcttttgtcttcttgatgcggcccgtttttcaactcctgaacagagatggtttggcggtgcttgtcccatttacctgaaaccgtcaccacagagccgagcgaaagcttcttcttcaaataaggccggttaaaacatacggctgtgattaaatagtggccgaccagaagcctgaatgtcagcctgtttcgtttttttccgtaataggtaagagaaggctctgaatgaaccttcccttcgactgtgactctttcatcatgctttacttcttctaaatccctcagctcgtagtcatcatagcgataagggaaataattcagaagatcagaaatgtcataaataccgagttcattcaatgttttttctgtttccggcccaatacccttaatgttagctatactagtttgctgatgttgtttcacgtgaacctagcgctcctccgaaaatttttttctctaattctcttcctgtcggtgttgccgctaaaccgccctggcctgtttctctaagtgcagttggcatcgtttggcctattttatacatggcatcgataacctcatcacatggaatacggcttgtaatgcccgccaatgccatatcagcagcaatcatcgcatttgacgcgcccatcgcattccgtttcacgcaaggcacctcaacaagccctgcaacagggtcgcacacgaggcctagcatattttttaatgtaatggccatggcttccgcgctttgttcgggtgttcctcctgccatttcaacaatagccgcagccgccatgcctgaagctgatccaacctctgcctgacatcctccggcggcgccggaaatgcttgcgttattggccacgacaaatccgaaagccccggctgtaaacaaaaagcggatcatttgttctcttgttggattcagcttttcttttacagcaaataacgtaccgggcaccacaccggcagaacctgcagtcggtgtcgcacagatggttcccatggctgcatttacttcatttgttgcaacggctttcgatacagcatctaaaatcagcgggccagacaggctttttcctgatcgaatataggcctgcaatttaacggcatctccgcctgttaagcccgtttggctcgtaactccctcgagtcctttctgaaccgccgcttccataacagacaggttatgatccatctgctgaaaaatgtcctcttttgttttttctgttacttccatctcttgagctatcatcacatcagagatcaatatttgtttttctttagtaatctcaattaattcttttacattacgaaacataactggctcctcctgacccttttcgctagtcagcaatctttgtcacttgaataatattcggcagcttcgacagctcgtcgagaatgtggtcgtcaatattttgatcgacctctattgtcatcagcgcaagctggccgatatctttccgggctacttccatatgtcctacgttgattgaaaatttcgccagaacattggcaacaccggcaattgtgccaaacttgtcattatgaacaactaatatggccggatgatttcctgacagccggagctcaaaaccattcaattctgtgatttcaatctttcctccgccaatcgaaatacccgtcagttccagctcacccttttcatcagaaatggtgatttttgctgtgttcgggtggaccgggactgcgtcttctacccgaaactctatatcaattcctttagcttctgcaatttgtatagcggttttaatccgttcatcgaatgtatcaaaatcaagcaatccgccgataatcgcgacatctgtgccgtggcccttatacgtttccgcaaacgagccgtaaaaagatacaatgatgcgctcaggctctctgccaaataaacttctggccactctcccgattctagcagctcccgctgtatgagagctggacggaccgatcataaccgggccgataatatcaaaaacgcttctgtatttcatgctattcctccttatgaaccagagcttattagcgctttgcttctagactaattgatcagatataaaatggcaagcgggcgcgttacagcgctgccgcacttaaaagcagacataagaatagaagggcaaattgcccttctattctgctgaaactatatacgaatacagaggctgtttcccattgtggatctcaacctcaatctcctcgtacttttcactgagaaacgcttcaagctgctcagcttcttcctgagacgcatcctcaccatatagaatggtcacgatttcatcatcttctccgatcatttctgacagcagcattttcgcggctgacagctgattttcagaagtgccgataatcgttccattcagaatgcccataaagtcgccttttttaatgtctttaccgtcaatatgagtatctctgactgagaacgtcacctgtccgctttttacttgctgaatggcgcttagcatattggcctcgttcgcttcagcttcttgatccgggttaaaagccagcagagctgacatcccttgcggaaccgttttagcaggaatgacaaaaacctgttcatccactacgctggccgcttggttagcagccatgataatgttggagttgttaggcaggataaataccgtatctgcatttacagacttcacggcatcaacaatatcctcagtgcttgggttcatggtctggccgccttcaatcacaacagaagcgccaatgcttttaaataggtctgcaattccttctcccatcgctacagtcacaatgccatacggctgttttgccggcggtgtttcgttgtctgcaggtttgctttcttgactgatgatagaggtatgctgttctctcatattttctatttttattttgatcaattcaccgtaatgctgggcgtagtttaacacgtttcccggctcttcagcatgaatatgaaccttcgccagcgattcatccgcaatcacaagcagagaatctccgaactggctgaggtcttgcctgaacgtgccttcgtcgaactctctttttgtctgatcaagcctaaccatcacttcggtacagaatccaaattcaatatcttcggtattcatcatgctttgcgcgctcttgtgatgctctgcgctgaccatgtcgtcaagtgacggaagaactgctttctgaggtacagtttcaccttttaatgaagcaaggaaaccttcatacacacagagcaggcctttgcccccgctatcgacaactcctacttcctttaggacaggtagcaattcaggggtgcggtttaaagacgcctctgcttcttctgtcactgcagtcatcagcgcagtgatatcggtttctttttctgctaagatcattgctttttttgcagcgtcttttgcaactgttaaaatggtgccctctacaggtttcatgacagctttatacgccatgtctacacctgcttgcagcgcagcggcaaactcaagtgcattaatttcttttttcgtttcaatgtttttgctaaatccgcggaacaattgggataggataactcctgaatttccgcgtgctcccatgagcagccctttagataacgcggagcccaccttcccgatatcatccgtatccatttgttcaacttctcttgctccggaagtcatcgacaggttcatatttgttcccgtatcaccgtccggcaccgggaacacgttcagtgcatcaactgcactggcgttttgagacagattctgcgctcccgcaagaatcatctcggcaaaggttctgccgtctaatgttctgatagacaatcctactcctcctaactacgggttcgtcactcgtacgccttggacataaatattgacagaatccactgccagtccgatggtttgatttactgtgtactttacttttgtttggacattatgtgccacttcagaaattttcgtgccgtagctgacaatgatatacatgtcgatatgtatctgttctccttcttggcgaacttggacacccctgctgaaattctctttccgaaggatttcagtcagtccgtctttaatctggtttttagaggccatgccgacaatgccgtaacagtcaaccgccgcgcctcctgcaaccatcgcgatgacttcattagatatatcaatctgtccgtacttcgttcttaattcaatggacacactagttcctccttcgaatgcatagagttacagctattctactatatggtttccattatgaaaagaccaggcaataatcgctggccgtacctctacatatactatagcgctgctgtttccgcaagatgtcaagtgaattttcttgaaagatgatgaaacaatagttgcaaacgttttttagctgtggtaaattatttaaagtatccatatcgaaagcatctaagattatatgaatgttaaaaagtagatgttttgtgcaagtgaggagggaaacaaatggcacgtaaatgcgttatcacaggtaaaaaaacaacagctgggaataaccgttctcacgcaatgaacgcttctaagcgcacttggggcgcgaatcttcaaaaggttcgtatccttgtgaacggaaaacctaaaaaagtatatgtatctgctcgagctttgaaatccggtaaagttgagcgtgtataacaaaatgaacgcctgccccgatatgtggcaggcgtttttatgtggtgaaagagggctttgaacccctgggcattaatcttttctaaatgagcccagcatcgcccggacaattcctcctaaaaacttcggcaatttaatggtgtaaaatttcatttttgtcccctcctataacgtcccgtaaccgccttgttcattgttttcagcaattgaatgaaagcacatgcttaatccgtgcttcttatcattattaatatgccttttgcaaacgaaaaagtacctcgtgaatgaatgagttcgttactaatacatagtgttgaaccgagcgtaatatgacaattatttagaggatatttaaaaccggtcagggtcagctcatgtatgtcttcggaaaacggtatgaaggagatatatcgcttattttcatccttctcaatatcatattcaccaggagggaacatttgaatatgattttgtttgtctatcagcctaatttttatgttcgtttttacacctttatacagaagctgaatgtttcctaaaaaatgatcagctctgccgcctgtaatgccgaaaatctgaataatatccggctgcttttccagcgcccaatcaagggcgaggtctaaatctgtttgatctttttctgcttgatacacatgaagggcgggagcggctttttctattcgccggcgttcttgctccgttatgctgtcaaaatctccgaaggcttcaacaggaatgatcccggcatctaagagagtgacggtgcctttgtcaacaccgatccaaagcgtgtgttcatccgtatagccggttagatcgggaatgagatttttcgggcctcccgcaacgatattaattgttttcatctctgattcctttctctgcatacaggaaaaagagcttaggctattgtatgcccagctcttttctaaagctgcttatttacttcctctgatttcagaaattgcttttttgcggtcagactggccataaacagctgaaccggcaacgagtaaatttgcgcccgcttcaatgacgagcggagcggtttctttgttgacgccgccgtctacttcaattaacagatctttttttcctttttcatccgccattcgcttaacctcttttattttaggaaggactgaatgaataaatttctgcccgccgaagcccgggttcaccgtcattaaaagaacaagatcaagatcgtcgaaaacatgttcgatgacttgtacaggggtatgcgggtttagaactactccggccttcactccttgctctttaatgagctggatggtacggtgcaggtgcggacatgcctcagcatgcacagacaggatatctgcgcctgctttcgcaaaagccgggatataacgatccggctcttctatcattaaatggacatcaagcggcagatccgttaccggccggaccgcttctacaatcagcggaccgattgtgatattcgggacaaaatggccgtccataacatcaatatgaatacaatcggctccgcctttttctacatctttaatctcattgcctaaagcggcaaaatcagcggaaagaatagatggtgcaacctttatcattatgctaatacctcggctttctgtctttaatctccgtcataaattcaacataatggtcatagcgatactgctttaattccccgtcttcaacagcttgtttcaccgcacatttcggctctttcagatgtaaacagcctctaaatttgcatgaagagcttttttctctgatatcagggaaggtatagcccagctcttcttcctcaatgtctgtaaattcaagcgagctgaatcccggtgtatctgcaaccaaacctccggacgtgtgaatcagctccacgtggcgggttgtgtgtttcccgcggcccaaatgctcggaaatctcgtttgttcttaatccgagctccggactgatcgcgttgagaagcgaggatttcccaacaccggactgaccggcaaataccgttgttttatcctgaaaatgcgggatgatgtccgctaaactatcttggtccttagaggaggtaaggtatacgtcataaccaatattccgatagtcttctgcataggcttgtatcgtatcttctgtatcttgatcttcaatcagatccattttagtaatgcatataatcggctgaatatcattggcctcaacgagaaccaggaagcggtcgagcaatgccgtgctgaaagaaggctgaaccgctgagaaaacaaggaccgcttgatcaacgttgcaaattggcggcctgataagctcgttggttctttctttaatttccattagatatccttctttgtcattttcagcttgatacacaacgtaatcaccgacaagaggggtaattttgttttttctgaaaatgcctcttcctctgcattgtattactttatctgaatcctctgattcatccagtacatagtaaaagccgcttagcgccttaataattttgccctcaggcatattttccctccttgttattcatctttcggatactcaatggttttgtagctgacaactttattgtttaccattacttgatagtaccctttttggcctggttcaatctttagttcgatcgttcgttcagtcggctcttttatcttaaattcttcgtaagtgtcagagatgctgtgatccgcatcgtcaaccgcgatttgcacttgaagctcgtccccttcattttctggttcgtaggggatcttgaccttttctttcactgttttcgcaggttttttctctggtccgagagagaatgtcacttcaacttcgtttcccggctttactgccgtacctgctgctggtttttgtttgacaacctgtccttctggaacatcatctgagtatgcttctttttctacaagcttcaatccgttgtcttccagatatccagacgctgcttctttactgtaggttttcaagtctctaagcgtaatgtcttcgggtccgatactgactgtaagtttgacttgatcttcactcgggaccagctcagtccctgctgaaggattttggtcaatgacagtgcccgcatttttctcgtcattcacttcatttactgttacatgattaaacccttggtccttcaacgctttttttgcttggtcgaccgtttggcctgtcacatcaccgatctccgtttttgcttttccggtgctcttataaagggtgaccgtggcgccttctttgactgtggtatccgctttaggatccgtttttaccatcaggccctcttcaattttttcatctgagatttccaacacctcggaatcaacctgtaaaccttctttttccaagagccctgcggctttttcgtattccattccggagacatcaggtattttgacatccttaggcatgaaaagcgacggaaaaacagtgacagcaagaattccagctgtgataaaaacgaggcatatcgtgagcaaaacccacggccacttttttcttttgccgttcttctttgttttgttttcttgtgcggttgtcacttcagcttctttttcgccagcagctttagcaagttcttcatctttaatgataggtatcgcttttgtcatttcttcatcttcttgaatcgtaaatctcttttcattgagtctgtcggcatcaaaagctgtttttatgtctgcttccatgtcttcagccgtttcgtagcgatgaaaaggatctttggcagttgccttgagtatgatgttttcaacgctttgggggaccgatggattccacctttttgccgaaggagtttccgcttgaagatgcttcaaggcgatgctgactgctgactctccatcaaacggaatacggccggttaaaagctcaaatagaacgattccaagcgcataaatatccgatttttttgtggctaagccgccccgggcctgttcaggtgataagtaatggaccgagcccagaactgaattggtatgggtgattgtggtcgaacttagtgccgtcgcaattccaaaatccgttactttgatatttcccatatgatcaatcaaaatgttatgcggcttgatgtctctgtgaacaatctggttttgatgggcatgagcgatggctgagacaatttgctccatgatgttcagcgcttctttagggtgaagcggcccatttgctgttatgtattctttaagcgtcatgccttcaacgtattccatgacaatataataaatatcatcttcctcgcccaaatcataaatgctgacaatattcgggtgatcgaggcttgatgcggattgggcttctctgcggaaacgtctgataaattcattgtcatttgcatagtcaaaccgcaggattttaattgcgacttcacggtctagaatgatatcctcagctaaatacacgttggccattcccccgccgcctatgacgcggagaatttggtaacgcccgctgatccgcttgccgattagcactgatcttcaccctcttcaacttgtaaagcaagctcaagcaaaactgctgtaatgttgtcttctccgccattctgattggctttgtccacaagcaggtttactttttcctgaggagctgaatcgctttgcaggatgtcttttaactcagtgccttccactttatttgtcagtccgtcagaacatagaagcagtttgtctccgggttctatatcaaaggaacgggtgtcaatactgactaactggtctgttccaagcgccttcgtcaacacattttttcgcggatgatgttcagcgtcttctctggaaatctctccagtgcgaaccagttcatttacaagcgaatggtcttctgtcacttgaacgaaatcatcgtcctgaagcaaatagcatctgctgtctccgatatgggcaacagaaaccgttttccccgtaaaaagtgcacatacaatcgtcgtccccatgccttggcattcttcgtgggcttgagcgtgatcgtatattttgctgtttaccgatagaatctgttcaatgagccatttttcacattccgagggcgcagttggaatcgtctctgcttcattccatttctcccccatggctttcacagccatcttgctcgcaacatctccagcaagatggccgcccatgccatcagcgacaaccgctaatataaattcatctttccccttgaatatccccgcatcatcttcattatgctggcggatttttcctgtatctgtttttaaggctgttaacaaccctcatcacctcgtctcgtcttgacgctccttcgcgcgaagctgaccgcaggctgcgtcaatgtcatgtccttgctctcttcggattgtgacatttactccgcgggatttcagcgttttttcaaaagcaaaaatctgatcacgcggtgtgcgcacatagtcccgttcaggcacgtagtttaccggaatcaagttcacgtggcatttgactccttccagcaagtcggcaagctcttcggcgtgttccacctggtcgtttacgcctccgaacagcccgtattcaaagctgatacggcgtcctgttttattaatataatatttaacggcttccattagatcaggcagtttatatgctctgttaatcggcatcaaacggcttctgatttctgtgttcggcgcgtgcagagaaattgcaaagttaatctgcatttgctgatcagcaaattcgtaaattttcgggatgattccactcgtagagaccgtaatatggcgagcaccgatattcaggcccttgtcatggttaatgattttcaagaaagcgagcatttcgttaaagttatcaaaaggttcgccgattcccatgatcacgacagagctgacgcgttcatccgtttcatcaagagctttttgcactttgactacttgagcgacaatttcccctgcttcaaggtttcgttttaagcctccaagcgttgacgcgcagaatgtgcagccaatacggcagccgacttgtgtcgttacacatacagaattgccatactcgtgtctcattaaaacggtttcgatggtataaccgtcatgaagctcaaacaaaaacttcatcgtaccgtcttgagaggtttgtttaacagccgttttcagcgttgttaacacaaagcgagtgtttaatttctcacgcagatcctttgagaggtttgtcatatcttcaaaagaagatacgcgtttttcatatagccattcaaagatctgggctgcacggaacggtttctctccattgtctgtcagccattgtttgatttcatctaattcaaaagaataaatagacggacgctctgtccgcaattcttttcttacttttgttttattaagttctgccattgcttatcccttctttctcatgctgcaaataaagaaaccatctgttccgaaataatgaggaaggatttgaagccttccatcccgaacaaagggtctcaccttttcaggcagccgcttttcaagagacaaatcgggttcaaaatcaggatgttcttgtataaacgcatgtattacttcatcattttctgtccggtccattgtacacgtactgtagacaagagtgccacctttttttactaatggtgcgatttccctcaagatcgacagctggatttcagctagacgggcgctgtcgtcaggttttttcgtgtatttcatgtccggctttcttctgataacaccgaaacctgagcacggggcatcgaccaatattcggtcaaactgttcgttttcaaacgtttcccccgcttttctagcatccattgtttccgcatgaatgattgtcaggccaagccgatctgccgcttctttgatcagcttcactttatgtttgtgaagatcaagcgacgtaacgctccccttgttcttcattaattctgcgatatgagccgactttccgccaggcgccgcacacgcgtcaagcactgtttcatctgacttaggatcaagggcgcgggcgacgagcatggagctctcatcctggatagaaacttcgccgttttggaagaaatgagttccggcaattgttccctttaagagcttcacagcatcttcagcgaggtcgcctttttcaacttcgattccctcagcagccatttggtcaagcagctcagctctgtctgctttcatttgattgacacgcagcgtctgtttcggcggaatgagatggatgcggcaaatcttttccgcagcttcaaatccatacgcatccgcccactctttcacaagccattccggatggcttgtttctgtcgccagccggcggacaggatcttcgatcgcgtcaaaggatggaacaccttcgcgctgaatagaacggagcacgccgttgacaaatgaagcaatgcctttgtgtccgcggattttagcaatctcaaccgcttcatgaatggctgccctgtctggaatcttctccaaatactccatttgatataaggataggcgaagaagctgaatcacccacggctttaccttttgaggcttattgataaacggtttaagcatataatcaagcgcgatcttattttgtaatgtaccatagacaagttcagtcaaaagccctctgttctgatcactcagttcatttgatttaatgaccgatttcagcagcaggttgctgtatgcctggttttgttctaatttgatcagcgcctcaagggcgatgtcacgaacactagtttttttcattgtttactcctaacacatcaccggcttcaacatgagcgcctcgcacaaagtcttcgcctttcattcgttttttgcctgccggctggagttcggttaataacagagccgtctcgttacctgtggcaacgataattccttccttttcaactgcaacgactgtgccgggctcagctgttgttggtgccgctatttttttcgacgcccatattttcaagttttgtccgtttagagtcgtataagcaacaggccatggatttaagccgcggatctggttgtaaagctcttcgcccgttctggaccagtcgagcagctcttgctctcttttaatgttaggcgcgtacgtcgctttctcttcatcctgcttttcaggtgatatgctgccggcaataacgtttggaaccgtttcagacaatagcttcgcgccagcaacgcttaatttatcgtgcagtgttccgacattgtcggtttcttcaatgtccacttccacttttgagatcatatcgcccgcatccaatttttctaccatatacataatggtaatcccggttttcttctttccctgcagaatggaataatggatcggagcaccgccgcgcagttccggcaaaagggatgcgtgaacgttaatgcagccgtattttggactgtcgagaagctctttaggcaaaatttgtccgaatgccgccgttacaatcaggtcaggctttaatgccagcactttttcaatttcttctgtcaatctgactttttccggctgaagaaccgggatgccgtggcgcaatgcctcttcctttaccggaggaggtgtcagtactttttttctgcccttcggacggtccggctgtgtgacgacccccactacttcatatccgtcctctatcagggttcttaaaacaggaactgaaaaatccggcgttcccataaatacgattctcgtcatcaaatcatccttccatatccgctagttcatcttctgtatagtatttacttattttagatgtaaacagcacaccgtctaagtggtccatttcatgctgcacggctcttgctaaaaagcctcgcgcttccagaatgaacggttttccctgacggttaaacgcacgcactttgacataatcggcacgtgtgacatcaccatagacgttaggaaagctcaagcatccttcaattccggtttgctcgccgcttttttctaaaatttcaggattaacgagatcaattctccctctgtcatccccgatttctacgacggccgctctttttaaaatgccgatttgcggcgctgccagtccgacaccatccatttcaagcatggtgtcgtacatatcatcaagcagtttttttagctttttatcaaaaacagtcacggtttccgcaggtgtttccaaaacctccgcaggatgtgtgacgaccttttttactgccaatttgttaccctccaagacgtgagatcttacatcatcatataaggattcatatcaattgaaatcattacatgtttttgttcaatttcgcgtttataatgttccagtatcttcttcaataaagcggataactgggtttcctgtttgtattttatcacgcattgatagcgatatctatctttgatcctggctatcggcgacgcgcttggtccgagaattttcgtgtcagctccgcagtttgctttcaaaaaatgagcgattttttcagctgtaaccgctgctttcgccacttcctcatgagaaacagtcacaagagccaaatagtagtatggcggataggattgctctctcctgtgcgccatttcatgctgatagaacgtttcataatcgtgtgttttcgtcagctggatactgtaatgagacggtgtatacgtttgaatgatgacatggccgggcttttcatgcctgcctgcccggccgctgacttgcgttaacagctgaaatgttttttcagccgatctgaaatcaggaatatgaagtgttgtatcagcacttaacactccgacaagcgtgacattcggaaaatcaagccctttcgcgatcatttgcgttccgagaagaatatccgcttttccttctccgaaagctgacagtaatttttcatgggcgcctttccgtgatgtcgtgtcaacatccatccgaatcactctcgcacttggcagcacttttgtcagctcttcctccactcgctgtgttcccgttccgaaaaagcggatatgctcgcttgcgcattcaggacaagtgtgcggaacaggctcttcatgtccgcaataatggcatttcagcctttggccgtaacgatgatacgtcatggaaatgtcgcagtgcgggcattgcgggacatagccgcaatccctgcacatcacaaaggaagagtagcccctcttatttaaaaacagcaccgcctgctcacccttggcaatcgtttcttcaagcttttccatcaattcaactgaaaacatcgagcgattgccgtttctaagctcctctctcatatcgacaagcgaaacctcgggcatcacccgatggttaacacggtgcttcagtgaaagaagctcgtatacgcccttttgcgctctagcatatgattctaatgtcggcgtagcactccctaatacaaccgggcagctgtgatgctcagcccgcttgattgccacctctttcgcatgatagcgcggcatttcttcctgtttataggaagactcgtgctcttcatcgatgattatcattccgagattttcaaacggagcaaaaatggcggatctggcaccgacgacaagccgtacttccttccggtggattttacgccactcgtcatatttttctcctgtggataaaccgctgtgcatgactgccacctgggagccgaagcggcccttgaagcggttgaccatttgcggcgtcagcgatatttccggtacgaggacgatggcttcttttcctttcgccagtactttttcaattgattgcagataaatttcggtttttccgcttcctgtcacgccgtgaaggaggaacactttatgctcatcgctgtccaatgtctcgcgtatgggctcgaaggcagccctctgttcgtctgtcagcggcaggggctctgtttttttgaacattttgtcctgatagggatctctgtaaacctcttcatagctttccttcaaaagccctttttggataagggttttgatggttgcagagctcgtgtccgtttttttgcacaattccgccgcaggaattttcacaccttccggctcagagatgagaaagtgaagaatcgcctgctgttttgctgcttggcgggacaatccctcagcctgcttagcaagctcttctttactcgcatttgcctgaatatgcctgaccatttttttattggttttttgcgcgactttatacgtcacgtcaatgtcccctttttgaacatgcctttgaatcagtttcagcgtctcatgatcgggtatatctgaatacagcagcgtctttgtttcagaaaacagccgttccacttgcggcggaagatcggctccgtgtgcaatttttaattctttttcatatttcgcctttaaggcggcaggcagcattgcttgaagcgccgttattttaaaagacagcgttttgtctgacagccatgatgacagaatcataagctcctctgtcagaacaggtgtaagatctaataaatcctctacttccttgacagattttcccgataggtcagatgcttctttgactgctgtcacaaacccttgaatcttacgggggccaaacggaacaatgacccgcatccccgttttgatcatgcccttcagatggtctgggattttataatcaaaaggcctgtctatatttttggtgctgacatcaacgatgacttctgcaaaattcatgagcgctctccggtttgttttgagagggctgcgatctcctgaaggatttcaaaagaaacatcgagcttagacataatcgggagttcgcgtttatgcccgtctttgaaaaagattgtcacgatattcgtatcagcaccaaaaccggccccatttgctttcacatcatttgccacaatcaaatcaaggtttttagcggcgagctttttacgtgcatagtgttcaatgtcttgtgtttcggcggcaaatccgaccaaaatctgctctttctttttctcgcccaattctttcaaaatatcgactgttcttttcagttctaaggtcatgccgccgtcttgttttttcattttatggtcaaatactgttttcggcgtaaaatcggctaccgcagctgttttaatgactatatcgcttgcgtcatacacagagagcacagcttcgcgcatatccgcagccgattgaacagggataaactcagcaaggcctttaggctgatcaagtgaaacaggcccagaaattaagattacccgtgcgccgagctgaacagcagcctccgccagtgcgtagcccattttgcccgtcgatttattggtaaaaaaccggacaggatcaatcgcttcccgcgttgggccggctgtaatgaccacatgcttgccttctaaaggagcggatgtttcttcagcaaaatgtttttcggccagctttacgatgttttccggctcttccaatctgccttttcctacgtaaccgcatgctaaatagccctcacttggctcaataaaacaataaccgtcctgataaagaacagaaatgtttcgtttgactgccgggtggtcatacatatgaacgttcattgccggcgcgatccaaacgggagccgttgctgccaacaatgttgtcgtcagcatatcatcagcgatgccgtttgccagttttccaatcacattagccgtagccggcgctacgataatcaagtcggcccagtctgcggcatcaatatgagaaatgacgcttggattttgttctttaaatgtatctgtatagacttcgtggcggctcaatgcctgaaatgtcagcggtgaaacgaatcggcaagcggattcagtcataatcactttgacatttgctcctgcctgaaccagcttgctcgttaacgcacaggctttataaacagcgatgcctccactcacgcaaagtaacacatttcgattgttaagcaatgaattctccccctctgcactttacaaaaccgcacggaaaaaaataacaacctacatgatataggttgctacttgtgctactattcgcggtcttccttttcaaacgaaagcaggcctgcatcaatttcttctaaagctttgcctacatatttgtgtgaaatcgtatgttcaatcatttggtcttttttgatttgcatttcacgggcacgtctcgcagaaacagtcaccagcgtatattttgaatctaatttattcattaaagaatcaattgacggatctaacattgattattcaacctccagcattttcttatatcttggtgcaacgcgttcacgcttcaaatgttcagcaagaacgattgctttgattttatcgcaagccgtttcgacattatcgttttcaacgacatagtcataagcatccatcatttcgatctcagcttttgcggctttcattcgattttcaatcagagcgtctgtttctgttcctcgtgtcacgattctgtttttcagttcagaaaggcttggaggcgcaaggaaaataaacaggccttccgggaaagcatttctcacttgaagagccccttgaacttcaatttctaaaaagacgtcttttccatcttgaagcgtctgttcaacataatcgactggcgtgccgtaataattgccgacatactctgcccattcaagcagcttgttgtccgcaatcatttgctcgaattcgtctcttgttttgaaaaaataatcgactccgttcacttcgccctctcttggacttcttgtggttactgaaatcgaatattcaaattttgtgtcttcctgcgaaaagatcgcttgtcgaaccgttcctttaccaactcctgagggacctgagagaacgattaataaccctctttctttcatgcggcaattacccctgcccttcatccataatttcttctttaacagaaagtctgtgtgcaactgtctcaggctggacggcagataagataatgtgatcactatccatgacgacaactgcacgggttcttcgtccgtatgtagcgtcaattagcattccgcggtctcttgcatcctgaatcatccgtttgattggcgcagactccgggctgacaatcgaaatcatccgattggcggagatgatattgccaaatccgatattaatcagtttaatcgtcatcttctacgttccccctgtaaaatagacgtctctagtttagcctagtaagaccgtctgtaaacaatacgcacagtcactattctatattttgcacttgttcttttattttttcaatagaacttttcatttcaacgacaagctttgtgatctgatgatcatttgcttttgagccgatcgtatttgcttcccgattgagctcctgaacaagaaagtcgagtttgcgcccgacagctccgccactagctaatatatcacgaaactgggcgaagtggctcttcagccttgtaatctcttcagtgatatcagagcggtctgcaaaaatagcgcattctgttacaagccggctctcgtctaatacgtcttcagtccattctttgattctggcatacagccgttcccggtaacgagatacgacatctgcagccagcaattcagtttctctcaccagctcttcaagctgatcaatatgcatcaggcagtctttcgctaagagcagcccctctttttcacgcatttcacagagaccttttaccgcttcttctgcagcatcgatgatcaacgcctccagcttgtcattttgcgtctgttcttcatgaacctggacgacatgatcaagcttaaagaaatccattacatcgggctctgcagacaattgataccgcttcttcatatctctcgcggctgcgacaaactcatcgagcagcggccaatcaatttcaagccttttctcaacaagcatatcgctgtcaacggatacgaaaagctcaattcttccgcgctgaatatgctgcagaatggtctgtttcagcttatcttcaaaatatagcaaaggccttggcaaacgagcgttcacttctttaaatctgtagttcacagatttaagttcaacgcttacagagagatcgtcttgtgttttgcttgcactgccgaagcctgtcatacttcgtatcattttaaaacacccaattcttccctgttctcataataaaagggcaatagacacgctattacccctaagattatatcatatgaatttatttttttcttgttaaaagtgaccccgccagcaaaaaagtagggatggcggacataccgatgacgagcatccagtcccccggcgtgatggctacagtatggaaaatcggctgaagcggcggatagtagattactacaagcatcagcaaaatggatgacaataccgcgccgattaaatacaggttttgaaacggatttctagagaaaacagaagtttcgctgcggcagtcaaacacgtgaataagctgagcgagcaccaatgtggcaaacgcgatcgtctgggcataagccaagttttccggattgcggtggtacacaatgataaacgctaaaatagtggcaactccgattaaaaatcctctggaaacgaccttccatcctagcttgcgggcaaataccccttctttcggatgacggggcttgcgcttcatgacgtctccttccggctgatccatgccgagcgccattgccggcaatccgtccgtcaccaagttgacccacaaaatctgaatcggaaccagcggtaaaggaagggcaagcagcatcgcaaacagcatgacaaggatttctccgacgttagacgccaacaggtatctgataaacttcctgatattttcgtagatgttcctgccttcttttatcgctgatttaatcgtcgcaaaattatcatccacgagaacaagagatgatgcttctttggccacatctgtcccggtaatgcccatagagacgccgatatcagcctgtttaatggcaggagcatcattgacgccgtctcccgtcatcgccacaatatgcccgttctcctgataggcttttacgatttttagtttatgttcaggggaaacgcgggcaaatacatacacatcctccaccacatgagaaagctcttcttgagaaagttcattcagcatcttgccgtccatgattttgccgcttttcggaaggaggcgcaagtctttcgctatcgctttagcggtttctacatgatcacctgtaatcatgacggtcttaattcccgcttcacggcattctttaatcgcctgtctgacttccggccgcgggggatcaatgatacctgaaaggccaagcatggtcagatctttttccgcctgctccattgacggtgtttcgcctgcttttatcggcctgtaggcgaccgctatcgttctgagcgcctgtgatgccaaatgtcttaataccgcctctgtttctgcttttctttcatttgaaaaaagagccgctgagccatcataataaatacgggaagatcgctgcatgagtacatccggcgcaccttttgtaatgatatagcgctttctgtcttgattctctacgatgacagtcatcattttccgtgcggaatcaaacggaaattcttcaatcactctgtaattagattcaacaaactcctttgaaaaaccgccttttcttgccgcggtgagcagcgctccctctgtcggatctccgtcaagcacatattcgccgtctcttttctcaatattggagttgttacaaagcgctccgaacagaagcatctgctgaagcggcttatgttcattgacactgatctctttttcgtttagtgtgaagcttcctttcggttcatagccggcccctgccactctccatgttttccctccggaccagacatgcgtcactgtcattttgttttgggtcattgtccctgttttatctgagcaaatgatagacgcacacccaagcgtttcaacagcaggaagctttctaacaatggatttttgtttaatcatcctctgtacaccaagcgaaagcgccactgtcacaatcgccggcagcccctccggaatagcggctaccgctaacgagacacctgctaaaaacatactgtacagatcatgaccctgaataacaccgacagcaacgacaagtacggtcagaagcaatgcaacaacaatcaaaatcttcccgagctgctccagtcttctttgcagcggggttgacaatgtccctgccgattcaagcatgtcggcaattttccccatagccgtattcattcctgtcccgacgacaaccccgacaccgctgccgcgggtcacaatcgtacccataaatgccatattggtaatatcgccgagtgaaacatccggttttttcaatttatcagcatgcttcacaaccgggattgattccccggttagcgctgattcttctatttcaaggcttctcgcttcaacaattcgaacgtctgcgccaattctgtccccgctcgtaaatttcacaatatcacccggcaccagttccttagaaggaatctttgtccagcttccttccctgagtgccatgacgtgcggtgttgaaagctcttttaaagcctgaagagattgctcagcacgcctttcttgaaagaaaccgagtatgccattcacaaacacaatcgcaataatcgcaaccgcatctacatattcaccaagaaatcctgagattaacgttgccgccagaagcacaagcaccataaaatctttgaactgcgcgaaaaacaagagaagcgctgaagtttttttcccttcttgcagctcgtttggtccatgcttgtcaaggcgtttttttacctctttttctgttaatccttgtttcatggacgtattggttgcctctagtaaatctgtttgtcccatttcatgaaacttcattccgctcgtccactcccctgctctcttatagagatatcactctataagcatgcttattctgactcgtcccatttcatgctataattatcgaatgcaggaagaatgagagggtgtattgcatatgtcgtttgatggcatgtttacatacggaatgacacacgaacttaacgagaaaataatgggcggacgaattacaaaaatccatcagccatataagcacgatgtgattttccacatccgtgccaagggaaaaaaccaaaaactattattatcggcacatccgagctattcacgggtgcatatcacggcacaagcttatgaaaatccaagcgaaccgccaatgttttgcatgttgctgagaaagcatatcgaaggcggattcattgagaaaattgaacaagcgggcttagaccgcattatgatttttcatatcaaaagccgaaacgaaattggcgatgaaaccgtacgaaagctttatgtagaaattatgggccgccacagcaatatcattttgactgacgcagcagaaaatgtgattatcgacggacttaagcatttatcaccgtcaatgaacagctaccgtacagtactgcccggccaagattataagcttccgcctgctcaggacaaaatatcgcctcttgaggcgtcagaagatgatattttgcgtcacctcagctttcaagaaggaaggcttgataaacaaattgtcgaccacttttcaggcgtgtctccgcttttcgccaaagaagcggttcacagagcaggccttgccaacaaagtcacactgccaaaagcgttgctggcactgtttgccgaagtgaaagagcaccgtttcattcccaacattacgactgtaaacggaaaggaatatttttatctgctggagctgactcatctaaagggcgaagcgcgccgttttgattcattaagcgaactgctcgaccgtttttatttcggaaaagctgaacgagaccgggttaagcaacaggctcaggatcttgagcgttttgttgtgaacgaacggaagaagaatgccaacaaaatcaaaaaattagagaaaaccctggagtattcggaaaacgcgaaggaatttcagctttacggagagcttttaaccgctaatttatatatgctgaaaaaaggtgataaacaggctgaggtcatcaattattatgatgaagaaagcccgacaatcacgattcctttaaacccgaacaaaacgccttctgaaaacgcacaggcctatttcacgaagtatcagaaagcgaaaaattcggtcgcagttgtcgaggagcaaatcaggctggcacaggaagagatcgaatattttgatcagctgattcagcagctttcgtccgcttctccccgggatatcagcgaaatcagggaagagcttgttgagggcaaatatttacgccctaagcagcaaaaaggccagaaaaagcaaaaaccgcacaatccggtgttagaaacatatgaatccacctcagggctgacaattttagtgggtaagaacaatcgtcaaaatgaatatttaacgacaagagtggcggccagagacgatatctggcttcacacgaaggacattcccggctcccacgttgtgatcagaagcagcgaacctgatgagcaaacaatcatggaagccgcgacaattgcagcttatttttcaaaagctaaagattcaagttcagtgcctgtagattatacaaaaatcaggcatgtcaaaaaaccaaacggcgcgaaacccggtttcgtcacttatgacagccagcataccgtctttgtcacgcctgatgctgatactgtcatcaagctcaaaaaaagctgagccgcataaagaaaagccagagcatttgtatgctctggcttatttctttcttctcatctgataaagcctgttcacttcagcaacaaaatcgccgtcaatcagcttatccacgttttcagcaagctctttcgtgtgctttggactggctccgcttgtagaaacagacacagtgacatgccctctttttacgattttcggcatatatacattgccaagctcagcgtcactgacacaattgacaagctgaaaaggcgaagcggattgggcaatttctttgttcactgccgcattatccgtcgcagcaataatgaagaaagcattgagataatcttctttttcaattgtccgtttttcccatttgatacgccgctcttctgccatttgcttgatttccggttccacatccggactgacaagcgttatatcagctccctcagaaatcaccgttttcagccttctgagagcgatgcttccgccccccgcaatcacaaccttcttcttttccaggctaatgtgcagcggaagcatatgaacctccatcaaaatcaaattgtccctcagaatttgccgcagtttctctcacacggttcaaaaatgcgtttttcacatgaggatgaaaaccgatataggaagagaggtagacgttcggattatgggcttttaatttctgaacctctcgttcgatttcattcatcagcatacccgtaaaaagcaaatatggaacgataaaggttgttatgccgtcatctttttcaagttctgaaaaaacctctttgtaattagggccgcatgctgtcaaaaagcacggaatgacttccttcactggaaccatttcctgaagaagattagcaattccggttacgtctcttttgacgtctggatctgaacttccccttccgatgagcaccactctggcattttcatacggaacacctatgtctttcattcggtgatatacagccttgactacttcttcgtcaatcccgatcggctttccgtatgaaatacggactgatggatatcgagatgcaacacggacaatttcttccggaatatcatgttttgcatgcgcagctgttaaaagaagcagaggcaccactgcgatatgagtggcaccttgcttcacacatgcttcaaatcctgtctcaattgtcggctcctgaagctctaaaaagctgatttcttgtactggcacagagatgtgggccttgcatccttccaaaaaggctgcggcttcttgctgcgcttttttgacccggctgccgtggccgacatataaaattgcttgtttcatttttacaacgcctcgcttaaatcttgtttttttagttcagattcaaaccattccagcttatagtgataatttacaacatttccaatgacaattaaactcggatttgtaatgttttcttttatcaccgtttctgaaagggtgtcaactgtacaaaaaacagatttttgcttgtccgttgtcccccaatgaataaaggctgctggcgtagaaccgtcccggccattttcaaggagttttctttcaatctgctgcacgtttttgatacccatatagatgacaagtgtatcaattcctgtagccagcgctttccacttttcctcaaaatcttcttcttttttatagtgacccgttacaaaagcgacgttagagcccgcatcccgatgggtaacaggaatcccggcataagcggctgccgcgattccagacgtaatgccgggaatgatttcaaacggaattccattttcagagaggcattccgcttcttcccctcctctcccgaacacaaaagggtctccgcctttcagtctgacaaccattttccctttttgcgcatacttcacaagaaatcgattgatggtttcctgcttcatcgtatgaaaatccggaagcttcccgcagtagatcaggtctgcttgctctttggcatattgtaaaatctctttatttactaatctgtcatataagatgacatcagctttttcaatggctttcagcgctttaattgtcagcagatcagggtcaccgggacccgctcctacaatatatactttccccatcgtatttcccccgatctattcgagttcttccagaagattcgctgtgatgatgttctcgcttgcattccggcatctgagaagaacgcagcagatcatattcagctcaatttttgtttaacaaactcgatcagctgatttttacacgcttcacggtcatgctgtcctgaatcaagaacgagctctggagcttccggttcttcataaggagaatcaattcctgtaaagaacggaatctcgccgtttcttgcttttttgtaaagccctttcggatctctttgttcacaaatatcaaggtcgcatttaatgtagacttcattaaattcgcccgcttccacaagctcgcgaacctgttgtctgtcctcgcggaaaggagagataaaagcagtaatcacaatggttccctgctgaacaaaaagcttcgccacctctccgatccggcggatgttttcttttcggtcttcatcagaaaaaccaagatccctatttaggccgtgacggatattatccccgtccagcacaatgacttggtagccttgctcaaacaattctctcgcagcggcgttggcaatggttgatttgcctgagccgcttaaccctgtcagccagagaatggagcttttatgcttgtttttttgctgatactcttcttttgtgatagaggcttcatgccatacaatatcgcgatttgtcactgccagtcctccttaagatacgcctacttcttcttttttcttcatccctttgattaacacttctactacttcttttcgactgaattcagcaggcggcagcacaccgtctctcagcatacctcttaccttagtgcctgataaaatgacgtgatgctctctgccatgagggcaagtttttgctgttcccatatttccgcattttttacagaagaagctgtgctcaaatttcagcggtgtaattccgagttcttcaggtttaaatgtgtcaaacagttcctgtgcttcgtatgttccgtaatagtcgcctacacctgcatgatcacggccgacgatgaaatgtgtgcagccgtagttctttctgacaagcgcgtggaaaattgcttctctcgggcctgcataacgcatcgccgctaaaaagacaccaaggaaaacacgatctttcgggtaataatgatcaagaagcacttggtagctttccatccgtacatcagctggaatgtcatcagattttgtttcacctactaacggattcaagaacaagccgtctactgtttcaagagccgttttttgaatgtattcatgcgctctgtgaacagggtttcttgtttggaaaccgacaatggtttcccagcctttttccgcaaactggcgtctcgtttctgacggttcaaatgtaaattcagggaactgttttgaagcttttttaatcaacgtaatcggtccgccgacatatgtattgccgcggctgaacagctttttaacaccaggatgctcctgttcatctgttttgtacacattgacagcttctttttgtttgtcaggcacgtacaggtcttcgatttggataacgccgtaagtttctccttcatacgttaactttaccgtttcaccaagtgacagttccgctgctttttgcgcatcgaccggaagcgtgattggaagagaccagacaacgccggaagaaagacgcatgttttcgaccactgatacgtaatctttttcattaaagaaaccttcaatcgggctgtatgcaccgataccgatcaattccaaatccgcgaaagaaattaaatcaagttcaatttctttttgaatgccgctcacatcatatgattcatctactctgtttactaatgttcctccgtgtggtgctaagctcataatatccatctcctcctagttaacttataaaattactcagattaatgatcagattcccccgccttgttcgtggactgagcgtctctctttacgaatggcctttgtcaggctgatggcaccgcccgccgctaaaagcacacttaccatgataaagatcgaataataatctgcttttaaaaacaaggatacaagcagataagaaatcgataaagataaaaacggcgatacgatccataccttcagcatcgtttgaacaacttgtttatggaacacgttcggaccgtttttcgccatgcctattccgataatagacgatgacgtgacttgcgccaagggcaccggcatcccaaatacagaactgatgatcaccagtcccgctcctgtaccggataagagaatgccttcccctttggagaacctcgtaattttcttcccgtttgtttctagcactcgccggcctaataacagtgcgccaagagcaacaaaagctcctccatacaaggttccttttccgacatcaagcacaccggcagctactaacgggccaacagcattcgccacgttattcatgccggcagagaatgcttcgaaaaatccggcaactaacaaaacaatgccgaggattttttgctttttagaagattttacttcaatcttaaaataacgaaacagcttagatacgaaataggtgaagccgaaagcgaacagcgggacaaaaacccaaaatgacacaatgatcagaagattgttcacaaacaatactttataagccactcccacgccgacaaccgcgccgactgttacttcacttgtcgacaaaggaatgccgagcagattagcagtaaagagcgacagggcagcagctccaataatgatgcaaacaatcgtcagtgtaatcgtctgctcaggaataatgccggagctgattgtttttacaacctcgcctccgccaatgaccgccccggcaaagacaccgactgcgcataggatcaaagcgtaagttttctttttgatggctccggagccgtaagcaacccccatcgaagctgcagcgccgcttgcaccaatattcatcgcgaaaaacaagctaaataaaatagcggctaattccattttgcagctccttattcatgcagtccgcattctgttttcgccataccattccatctgcctgagcgcaaatcttctgctgtaaaagcgggagaagtgcaaggcgcacagccaatacttggatagccttggtcatgaagcggattgtagtccagttcattccgggatgtatatctccaaatgtctttccaagtccaatggataagcgggcaaacttttactgacttgaatttttcatctttgtttaagaaattcgtattggcacggcttggcccttgatcacggcgcaggccggaaagccaggctggatgtcctgaaagcgcctctcttaaaggaacgacctttctaagatagcagcactgattcggctctctttcccatagtttgtcaccatgttcttcggcttgttcctcaagggtgagatctggttttttcaggatgatattaagacccggataacgctctttcactcgttcaattgtttcataggtttctttaaaatgaagtcctgtatcaagaaacacaatctctgcgtcttttttcactttataaattaagtcaatcagaacgattccctcaattccgaaactgcaggcataaacaagctgatcgccgtaatggccgtatgcccattttaaaactgacagcgctcctttataaggatcgtcttccggaaatgtaatcgttggttcttcccaattatcatacgttaacatttcttctttcctcctttcggagacaaacaaacagtagctttctgccggttgtcttttcccatgtaatgtgattcgcggctgctgatatacagatagcctttttacctcttaaaataaaaaactttcaatccggcggaaagaaagacaggaacagcatgcagcccttatctttcaaaatggaattcattttgctggaagtagcaccttacaaactatgcaggttgccgggcttcataggtccagtccctcagccgctcttgataagtttttagatttgtagtaaattttagcacaattctaacataagtcaacccgactttttttataggattaataaaaaaacaggcctcacagcctgttttcaagtacagcaaggctttgaagcctctttacatcatttgaatttattttttattttttaaaccaatcttttgactcgggatttcgtttccatgtttgcagcttttttagatcatctgaatgaatatttccgttttcaagcgcgacctctgtgagcgtatcataatcggttaatgagtagtatggcagttctgcctttgcgaaggcttcctccgctttaggaagtccgtacgtaaagattgagacgacaccaagcacttcacagccggccgcttgtaaagctgcacaagcttcaagcacgctgcctcctgtggaaattaagtcttcaatgacgactgttttttgcccttcttgcacagctccctcaatctgattgccttttccgtgcgccttcggcttgctcctcacataacacatcggaagattcaaatggtccgccgcaagagcagcatgaggaataccggcagttgctgttcccgcaatcatttcagcttcaggaaaatgctctttaacaagcttgctgatacctgaagcaacatcgtttctgacctctgggaaagatagcgtaaggcggttgtcacagtagatcggtgataaaatgccgcttgcccatgtgaacggctcgttcgggcgtaaaaatacagcttggatgtctaatagatgttttgcgatgatttgtttcaagatttgattccctcccattcaagtctgacagccttataggcttttaccgggtcttccgcttttgtaatcgagcgtcctactacaatcgctgatgaacctttctctcttgcaatggcaggcgtcgctacgcgaacttggtcattcgcagcgtcctctgacattctgatccccggagtgacagtcagaaatgaaggcgacaccgcttggtaaatggcttttgcttcatgaacagagcagaccactccatccagtccgctttcttccgcctgtttgctgtagtgcacaaccgtatcaatcagagacttttcgatcagcagttcatctttcatgatttgttcagatgtgcttgtcagctgggttaccgcgataagtgacggacgtttttttccagccggcgtaccttcttctaagccttcgagagctgcctgcatcatttttttgcccccggcagcatgaacattgacgaggtctactccaagactggcaaggcgcttcatcgctttgtttacagtagtcgggatgtcatgaagctttagatctaaaaatagctcgcagtttctttcttttagttgtttcacgatagatggcccttcttgataaaaaagctccatcccaacctttacaaataacggttcttgctgaaaaggcgctaagaacgcaagtgtttcttcagctgacgcaaaatcaagcgcgatgatgggcaggttgtttttcatgattccagctccttccgatgcattcttcaattgattgatagccgtattggagcaaaacagatgggagctgttcaataatctctggacatgcaaaaggattcacaaagtttgctgttccgacagcgactgcgcttgctcccgcgagaagaaattccagggcatcttcagccgtttgcacgcctcccattccgataatcgggatgttgaccatctggctgacttcatacaccatgcgaatggcaaccggcttcacagcagggcccgaaagtccccctgttttattcgctaatatcggtttgccggtttttaaatcgagtctcatgccgattagtgtgttgatcatcgtaagaccgtccgctcccgcttcctcgatcgctaatgcaatttctgtgatattagccacgttcggggatagcttcacataaacgggtacatccgaaacctctttcaccgcttttgtcaaatcggcagccatttcaggattcgtgccaaaagcgattccgcctgttttcacattcgggcaggaaatattcaattcaagagcatgaacattaggcgctttgctgatatgttctgcgacttcaacataatcatcgacttgagaacctgcgacattggcaatgatcggtgtatcaaactgctcaagccacggcagctcatgatgcaacacactatccagccccggattttggagaccgatcgcattgagcattccagcaccagtctcagctacccgcggcgtcggattcccaaagcgcggctcctttgtcgtagccttaatcatgatagctccaagacaagacaaatcataaaaacgtgaaaattcttttccaaaaccgaagcagcctgatgcaggaatgattgggtttttcaaatcaagtcccggcaatttcacctctagcattacagcgccacctcctgagctttaaatacaggcccgtcgagacatacttttacataggatgtctcactttcgtttgtatggcacacacacgcgaagcatgcgccgattccgcagcccattcgttcctccatggacagatatacttctttatgggcatattcctgttttaacgccttgagcatcggtgtcggcccgcagctgaggaggatatcaaactctagctttttccgtttaatcacatctgtgacaaatccggtttccccgtagcttccgtcagctgttgccacatacgtgtctccgtactgccggcattcttcctcgtaaaaaacatcctttgccgattggaatcctaaaacgtggatgacatttacccctttttcaatcaagcgtttcgacagctcttggagaggcggcacacctactccgcctcctaccagcaaagccgtctttccgggttgaacttcattaacaggaaagccatttcccaaaggcccgaggacatccacaagttctccctgctgcttcagtgacaagagtcttgtcccttccccatctacccgataaatgatggtgacttcatttttttcaaagttgacgtctgcgatgctgatcggccttctcaaaagaggcgtaaccgcttcgctcactttaagatgaaggaactgtccaggggttgtaaacccttggacaagctcccctttcagaaccatttgaaacacccggtctgcaatttgctggttagaacatactgtcaaatacgcttttttcatatagtgactgccgcctcctgatttgtgttgactgccggcatttgatcagcacggaatgtcatgctttccagcactcgcaatatcgcctctgccgtatctaaagatgttaggcaggcaacaccattttctactgattcacgtctgattctaaaaccgtctcttgccggctgctttccttttgtcagcgtattgatgacaaactgcgcttctccgtttctgatgacatcaagcaagttcgggccatcctgaccgatttttccgacgaccttcgctggaatggaagcttctttcaggtagcctgccgttccttccgtcgctaaaatgttgtagccgatcgcgtggaaccgcttagcaatggcaagcccttcttctttgtccttatcagctactgttaaaagcacggaaccgtagttcgggatttgaatacctgaagcgatcaaggctttgtagagcgccttttcaagtgtcgaatctttccccatgacttcacctgttgatttcatttcaggccctaacgtaatatccactcttctcagcttggcaaaggagaagaccggcgcttttacaaatacaccttgctgttcaggctgaaggccctctgtatagccaaacgcagccagcttttgaccaagaatgatttttgttgcgagattcgccattgggatacccgtaattttgcttaaaaacggtacggttctgcttgatctcggattcacttctagcacgtacacctcgccttgcgacaagacgaattgaatattgagcaaaccgacaatattcagccctttagccaatgcgatcgtgtattgttcaatttttttcttaatgtcctctgtgagagactgaggcggataaacagcgattgagtctccggagtgaacgcccgcacgttcaatgtgctccataattcccggaatgacgactgtttcaccgtcggatactgcatcgacttcaatttcttttccggtcaagtatctatcaattaatacagggtgctgtggattgattttgactgcatttttcatgtaatgaagcagttcctcttcatggtaaacaatctccatcgcccggccgccaagtacataggaagggcgtaccagtaccggataaccgatatcacttgcgatgcttaccgcctgattaactgatgtcgctgttttgccaagcggctgaggaacaccaagttctccaagcgcttgttcaaatttatcccggtcttcggcacggtctaaatcttctaatgaagttccaaggattttcactccgcgtgcagaaagctcgtcagcaaggttaatcgcagtttgtccgccaaattgtacgacaacgcccattggctgttcgaggtcaatgatgtgcatgacatcttcaatcgtaagcggttcaaaatacagcttgtctgagatgctgaagtctgttgaaacggtttccgggttgttgttgacaataatggcttcatagcctgcttgtttaattgcccatacagagtgaaccgtcgcatagtcgaactcgacaccctgaccgattcgaatcggacccgaaccaagcaccatcacacttttcttatctgtaacgacagattcattttcttcttcatatgtgctatagaagtatggcgtttctgactcaaattccgccgcgcatgtatctaccattttgaataccggcgcaatccccgcttgttttctcaagctgtaaagctcagattctttcattttccattcacggctgatgtactgatcagagaagccgagttcttttgcccgtctcagcacatctgtatcgcccgcattggccttcaattctttttcaaactgtacgattccgaacagcttatgcaagaagaagacatcgatagcggaaaattcatggaggtcttctaccgtgtagcctcttctgtacgcttcagctaagtagaataagcgttcatcaccggcctttttaattcgcttttcaagaagctcatctgaaatgtcagcggcgtccttcaattcaagatgatacacatccgcttccagtgatcgcactgccttcagcaatgactcttcaagcgtgcggccgattgccatgacctcacctgtcgctttcatttgcgtgccaagctttctgtttgctgattcaaacttatcaaacggccagcgcggaattttggatacgacatagtcaagagcaggttcaaatgctgcatatgtttttcctgtcaccgggttcatcatttcatctaatgaaagtccgactgcaattttagcagcgagctttgcaatcgggtaccccgttgcttttgatgcaagggcagatgaacggctgacacgcggatttacttcaataatgtaatattggaagctgtctggatctaaggcgagctggacattacatccgccttcgatcccaagcgcgcgaatcagttttaacgatacattccgcaagagctgatattcgcgatcgctgagcgtttggctcggcgcgacaacaatactgtctccagtatggattccaactggatcaatgttttccatgttacaaacgacaatggcgtgatcctggctgtctctcatgacttcatactcgatttctttatagccggcgatgcttttttcaagcagacattggtgtaccgggcttaatttcaagccgttctcaacgatttcttttagctctgtttcattcgagcagatgcctccgcctgttccgcctaatgtatatgccgggcggacaatgacagggaatccaatttgactgacgaatttttctgcttcttcaagggagtggataatctcactttcaggcaccggttcattcagttcattcattaatgttctgaacaagtcacggtcttcagcttgctgaatcgcagacagtttcgtgccaagcacttcgacgccgcattctgccaaaacgcctctttcagaaagctcaaccgcaagattcaaaccggtttggcctccgagtgtaggaagaatggcatccgggcgctcttttctgatgattcgtgtcaggaattcaggtgtgagcggttcgatgtaaacccggtcagccatttctgtatctgtcatgatcgttgcagggtttgagttgacaaggatgacttcatagccttcttctttcaaagcaagacaggcttgtgttcccgcatagtcaaattctgctgcttggccgatgatgatcggtccagatccgattactaaaattttgttaatgtctacgcgttttggcataccgcttccccttctttctctgttgtttcgatcatttcgatgaatctgtcaaatagatggttggcatcctcaggaccaggtgaggcttcgggatgatattgaaccgtaaatgccggcaatgttttatgcttcagcccttcaatcgtatcgtcgttaattgcgatatgcgtcacttccagttctgttttactgatagacgaaactgtatatccatggttttgagatgttaaggcaacttttcctgtagccagctcttttaccgggtggtttgagcccctgtggccgaatttcattttttcagtattcgccccgcacgccagcgcgaataattggtggccgagacatattccgaataatggcacttttccaagaacacctttaatcatttcaatcgcttcaggcacatccttcgggtctccaggtccgttagaaagcatgataccgtccggtttcagctgaagcacctcttccgctgtaatgttgtaaggcacaacgatgacgtcacatttccgtttgttcagctctcttagaatcccgtgtttcatgccgaagtcaaccaagacaatgcgtttgcctcttcccgggctcggatatgctgtttttgctgatacttgggatacttgatttcttggcaattccgtttcgttcagtcttttcagcactgcttcgatatcttcatcagatgaagcgaatgttccttttagcgcgcctgccgtgcggatcattcttgtcagcttccttgtatcaattccctggagtccgggaatgtttttcatttttaaatactcgtctaaggtgtatgctgaacgccagttggaaggcagctcacataattctttgatgatcagccctttgacaaaaggggtaatggattcaaaatcatcacggttaatgccgtaatttccgataagcgggtatgttaatgttacgatctgtccgcagtaagaaggatcagataaaatttcctgatagcctgtcatcccagtattaaaaacgacttctcccatgttgtgttctaagcttccgaaagcttctccctcgaataccgctccgttttccagtactaatcgtctcttcatttgacaagtctcccctcttcataagcaagcttccctgccgcaattgtagcgaccggccagccggtgcaactgatgccgttgaatggtgtattttttccttttgataaaaatgtctctttgtctataactgcttctttttctaaatcgattaacgtaatgtccgcagcttgccccgtttgtaatgttccatatgggagaccgaacgcttcgcatggcttgattgtcatgtagtcaatcagctgcttcagtgaccagctgccatttttgacaaagtgtgtgtaaagaagcgggaatgctgtttctaagccgacaattccgaatggcgccagcttcatttctgtgttcttctcttcttccgtatgcggtgcatggtctgttgcgataaaatcaattgttccgtctaaaagaccttcaattaaagcagctctgtcttctgggctgcggagcggaggattcattttatagtttgtgtccagccccgggatgtcctcatcacaaagcagcaaatgatgcggcgatacttctgctgtcactctgattcccgcttttttcgcatcgcgtacaactctgacagattcttttgtgctgatatggcatacatgataatggcagtttgccgcctcagccagcagcacatcgcgagcaatatgaaccgattcacacacagaaggaatgccgtttagcccgttcgctttggagaatgtcccctcatgtacgctccctccgtaaattaaggagttgtcctcgcaatgtgcaacaatcgctttgtcaattgcggctgcccgtttcatcgcttcatacatcattcctgctgtctgtataccaacgccgtcatctgtaaaagcaaatgccccggcttcttttaacgcttcaaagtttgtcatttcatcgccgatttgtctgatcgtaatggatgcatatggaagaactcttacgcatgatgtttctttaattctgttttgcacccattccatctgctcctttgtatcaggaaccggccgcgtattcggcattgctgctactgtagtatagccgccgcgcgccgctgcttttgccccggtttcaatagtttcttttttctctccgcccggctctctgaaatgcacgtggagatcaacaaacccaggtgaaacgagcaaaccttttgcatcaattaccgtttcattatccgttgcatcaagcttgccgattgcggtgatggtttctccagtcactcggatatccgcttgtgttttttcaccattttcgtttagtatccagccgtttttaatgagatatgacatacgctgcttctcctcttttcacattggtttgtaaggcacgctgtatcactgccattctgataaatacgccatttttcatttgcttgaagattcttgatttttcgctttctactaagctgtcatcaatctccactcctctgtttaccggagcaggatgcatgatgatcgcatgccgcttcatacgctcagcccgttctacggtcaagccgtatttgtttaaatagccttcctgactgacagcggactgatgtcgttcattttgaatgcgcagcagcatgacaacatcggaagactcaactgcttcatccattgagacatacgtgccgaatgtattttcttcatcctgccattccgaagggccggaaaataggacccgggcacccaatcttgtcaacacttccgcatttgaccttgccactctgctatgcttgatgtcgccgtgaatggagacggtaagccctttaaacgtattgaactcttcataaatcgtcattaaatcaagcagtgattgtgttggatgctggccgcacccgtctcccgcattcagaatcggaatgttcacctggctgacaagctcttcataatactcatcctcactgtgcctgatgacgcagacgtccacaccgattgattcaagcgtccggatcgtgtcatataaggtttcgcctttttgcacgcttgtgcttgttccatcaaggttaagcacattcatgcccagctttttttctgcgacctcaaagctgaaccgcgttctcgtgctcggttcgaaaaacaggtttgctgcaaactttcctgtaagctgattgtctgtttttccgcttttgagctcttgtgctgtttgaagcaaatctttgatttcctcagtgctaagttcactcatcgtcgttaaatgcttcatgttctttcccctctcttttcaacttaaggctgaaaaaaaaccccggtctaagatagactcggggtatggttaaatagagggcagcattgaagcttccttctcttcataacccttccaagcctctctggactttcattaaaaggttttaaatatgatgttgttcagatgtgtctgcctgctcttccttcgcctgcggaagaatcaggtttaagatgacaccgacaattgcggcaagcgccattcctgacacttggaatccgccctgagacacttggataaaagcgcctcctacaccgatgacaaggataactgatgtaataatgaggtttctgttgttttcataatcaattttgttgtcaatcagcattctcaggccgcttgaagcaatgattccgaacagcaggaaggagacgcctcccatgaccgctgacggcactgaactgatcagcgctgaaattttgccgataaagccgaagcaaagggcaatcactgccgcgcccccgatgacaaagacgctgaatactcttgtgatggccagcacgccaatgttttctccgtaagtcgttgtcggagggccgccgatcagggaagcgaggattgtcgccacactgtcacccataatagagcgatgaagacctggctttttaatgaagtcttgtccgacaaccttgctcagcaccatttggtggccgatatgctctgacattgtgacaaatgcgacaggaaccattgcggctgcgatgccgagcgtaactgacggtgaataatctttgaacggaatgataaattcaggcactgcaaaccatttcgcgtcaagcaccggctggaagttgacaatcccttgagtaagggcaaacaggtatccgccgatgattccgatcagaaccggaatcaggcttaaaaaccctcgtaagaaaatcgcacaaataatcgtaattgccagcgtaactcctgcgacactaaagtgctttaagctgtagaccaactcactcgcgttcggatcagcatacatcgccatgtttactgcagtgcttgccagtcccagcccgatgacgataataacaggccctacgactacaggcgggagaatcttcatcagccatcctgttccaagctgcctaatcaataaggcaatcagcccgtacaccagccctgcaagaaacgctccaaccattgccgctcccggcccgccggtcgcttttaccagaatgatcggagaaataaaggcgaaggatgaaccgagatacgccggaatttgtcctttggtaataagaaggtacgccagtgttccgatgccgcttgtcaccaacgccacagcaggactcattccgacgagcttcggaaccaaaatggttgagccaaacatggcaaacaaatgctgaaggctgaatgaaacccaagagaaaggtgtcgggacatccctgacccctaaatttacttttttcttactcatgatgatttccccctgattgttgactttcattttaggatgactcaatgactgtataaaaaaacctctttgcttttttacgcaaagaggcatacaaagacctgccgaatactttttgggcctttgttgtgcacctctttgcaacctctctggattgcccttaaaaaggtgatctattattcgttttcataaatggcgacgagatcgttttggtctacctcatcaagctgtaccataaccttttcagactttgatgtcgggatgtttttcccgatataatccgctcggatcggcagctcccggtgtcctctgtccacaagcactgcaagctgaatggaggaaggtctgcctacatcaacaagcgcatccattcctgctctgactgttcttccggtatacagaacatcatcaacgagaatgactttttgatctgtaatatctaccggaatatctgcaccttttacaagcggttcatcgttgcttgtttttttagaaagatcatctctgtaaagagtaatatcaatttcaccgactgtaacaggatttccctcaatctgttcaatgcgttccgcaaggcgttttgccaggtaaatccctcttgtcttaatgccgacaagaatgcagttattcattcctttattgcgttcgatcatttcgtgagcaatcctggtcagcgcccgtctaattgcctgttcgtcgagaatgacagctttttgattcaatgtgtgacacctcacagttcatatagaagaaaaaacccctcctgccagagcatagaggggttttaggacaaggtgcgcgcctatacacgcatcccgtctatccgttatccttctcagcctctctggactgttttaaagaatctattcagcttcgtttattatttcagaaaagaaaccctctgtcaaccgttttttctgaggttttcgattaattctgccatatcctcgggaagcggcgcttcaaattcgacatattctcctgttcgtggatggtcaaaacctaaaactcccgcgtgaagcgcttggccattaaagtcgattgtttttcttgggccgtatttcggatcgcctgctaatgggaatccgatatatttcatatgaacacgaatttgatgggttctccctgtttcaagctggcactccactaacgtaaaatcctgaaaacgctcaagcacatgaaaatgagtgacagcgtttttgccatcacgtgtcacagtcatgctttgacggtcttttttatcccgtccgatcggcgcgtcaattgtgccgtcatcatgagaaataagcccgtggacaaccgccgtatatttccgcgtgaccgttttgttgaccaattggtttacgagtgactcgtgcgccatatcatttttcgccaccattaataaaccggacgtgtccttatcgattctgtgaacaatacccgggcgcatcacaccatttattccggaaaggtctgtgcaatgagccataagaccgtttacaagtgtgcccgtaagatgcccgggtgctgggtgaacaaccattccgcgaggtttgttgacgaccagcacatcctggtcctcataataaatatccagatccataggctctgccaggacgtcgagcgcttccggttcaggtacagtgacggtcacctgatcacccggctgaattttataattcgctttcaccgcgcttccgttcacgacaacctgtccgtcttttacccattgctgaacctgggttcttgaccaatcattctcagtcgatgccaaaaatttatcaatccgctcacttttttgttcttctgaagcggttatatcaatttgattcatgctattgctcctttttctttttcccgctgtccaacagcatttgtataaataaaagcattacgccgacacatagtgaagagtccgcgatgttaaatatcgggtaattgtaattgacaataataacatggataaaatccacaacttcctgtctgacagcccgatcgataaagttgccgatggcaccgccaagcataagtccgagggcaacgccaagaagcctttgtccctttgtataacgctgtatgtaataaacaataccaataataacagcggttgttatgaggtagaaaaaccacatttgacccgctaatatcccccatgcagcacccgtattgcgatgggaggtgatatagaatacctgatcaatgatcggaatgctttggccaagttccatgttcttaacaactagccattttgtcaattgatcggctgcaataataagtagtgcaatcatataatacagcacaaacgttcctccagtttacggttactttaatccattatgcattttatcaataaaaagcactggagtaaagaaatatcaggcatattaaccggacagacactgttattcatacagtgcctgaccatattcgatatccgttgatttccatatcggaagcgtttttttctcaaattggacagaataaagaaaatcgtttgctgttcgggccgtcggcagcactgccagctttgcaagaggaatgggggccccagtttcttcacagtatccgaatgtgccgttttcgattttggacaatgcaaggagaacgtcttgaagttcttctttaatatgatagatcagagttgctttttgtttttgattgattgctgcttgcgggcttgtagaaacctgaaagcaagaatactcaaataatctcgactgtaattcttctttcatcagaagaagttccgtataaattgcggtcagttgatcattcattcttcacaactcctgctcttaacgtagtatctttattgttgcctgtgaatgatgatctaaagcccataagatttttcctttcgttctaaaggatgtcactcttggcacaaaaaaagcccggcttttacgccgggctcttttgcattatttttgatagtatttttcaacgatttcagcgttgcgtaatgaaagtgtaggatatttcggatttgcccctacatcttttgaaatcacacgagatctctcacacatttcgccttccgctttctcgacagcgattttacccgtcgcaaagctttgcgcatcgttcggcgcttcattttcttcgctgattgtcagttcagacacaataaacagctgagaaaggttttcttttatggaagccaagagctccttgttttctttgtttggatacaatttcaggtttgcttccaaagatttaccgataattttttcatttcgcgcagtttctaatgcttttaacacgtcatcacgaagagccataaagcggtcaaatttttcttcagtcgcttcactgtttggaaccgtgattgtttccggcatatcggtcaactgaacgctctgctcttcaacaaatgttaaatgagaccacaattcgtctgccgtatgtggaaggataggcgctgaaagcttcactaatgcaagaagcgtttcgtagaatactgtctgcatgctgcgtctatccggatgatccgcatgctcgatgtagacaatatcttttgcaaaatcaaggtagaatgagctcaattcgattgtgcagaaattatgaatgctgtgatacacaaccgcaaattcgtactcatcatacgcttttttcactttatcaatcagcttgttcagcttaatcagcatatactgatccacttcgcgaagatcttcgacagccaccgcatttgtttttggatcaaaatcgaaaaggttgccgtgaaggaaacggaacgtgttgcggattttacgatatacttccgcaacctgcttcagaatggcgtcagacacgcgaacgtccgcctgataatccactgaagatacccataatcttaagatgtcggcaccaagctgtttcatgactttagccggaacaacaacgttaccgattgatttactcatcttacgtccttctccatccagtgcgaacccatggctgagcacacctttatacggcgctttccctgttacggctactgctgtagaaagagaagagttaaaccagccgcgatattggtcagatccctctaggtatagatcagccgggcgaacgaggtcatcacgttcttcaagcactgcttgatgtgaagagcctgaatcaaaccaaacatccatgatatcctgttcttttgtaaatgtgccgttcgggctgccaggatgcgtaaagccttccggaagaagatcctttgcttctttttcaaaccaaatgtttgatccatgctgtctgaacaattcagaaacatgttcaatggtttcatctgtaataaccggttctccgttttcagcgtaaaataccggaatcggcacaccccacgcacgctgtctggaaatacaccagtctccgcggtcccgaaccatgttgtgcaaacgctgctcgccccattcaggaacccatttggtttctttaatggcatccagcaggtctgatctgaaatctttaatagacgcaaaccattgcgctgttgctctgaaaatggttggtttttttgttctccaatcatgcggataagaatgagtaatgaattcaagcttcacaagtgcgcctttttcatcaagctgctgtgtgatcgctttgtttgcatcatcatagaacatgccttcaaagccaggagcttcgcttgtcattacacctttttcatcgaccgggcaaagcacatctaaaccgtatttttggccgatgataaagtcatcttccccatgtccaggcgctgtatgaacacagcctgttccggcatcagttgttacgtgttcaccaagcataacgagagagtctctgccatatagcgggtgttcagcgataatgttctcaaggtctttccctttgaccgttcttgtcacttcatactgatcaaatccgcatgccgatgcaacattttcgactaaggcacttgctacaacaaagcggtcttcacctactgcaatcacgctgtactcaagatcagggtgcactgagattccgaggttcgccggaattgtccacggcgttgttgtccaaatgatgatgcgctcgccgttttcaagaacgccttttccgtcttttacaccaaaagcgacgtaaatagatgctgaacgtttatcttgatattcgatctcggcttcagccagagcagactcacttgaaggtgaccagttaaccggtttaaggcctttgtaaatgtagcctcgttttgccatttcaccaaatacgcggatttgctgcgcttcgtattccggttttaatgtcacatatgggttttcccagtcaccgcggacaccaagacgtttgaattgctcacgctgtccctcgatttgcttccaagcgtactcttcgcatagtttgcggaattccgctactgacatttctttgcggttgacctttttgttttttgtcagagctgtttcaattggcaatccgtgtgtatcccagcccggcacatacggtgcgttgtagccgctcattgatttatagcggacaatgaagtctttcaaaatcttgttaagtgcatggcccatatggatgtcgccgtttgcatacggaggtccgtcatgtaaaacaaatttcgggcggtctttcgtccgttcctgaacaagacggtagatatcttcttcctcccattttttttgaatgtcaggctcacggtttggcaaatttccacgcatcgggaaatctgttttcggcattaagagcgtgtctttaaaatccattttcattcctccactgcattttttcagaaaataaaaaaagccctctcatcccataagggacgagaaagcttatctcgcggtaccacccttttagaaaaagcaagcatacactttttcctcttgagcatcgtaacgtgatgaacgtcctaacctactgtgagttcagcaaggaaactaaagggctgatctacatgattccggccatcccggactctcaccatctccgggtcgctatgaaggcctgaaggaaacatgactgtccctttcaaccgttttttcatctgaatttatgaacgtattatattcgacaagctaagaaaatgtcaagataatcagagaatttattccttttcctcaaatacagcgtcgacttcatactcaaggagatgatcccaatcgtcatttttcagaagatcaagctgagcttcaatcagcatttggaaacgtgttctgaacactttagactgttttttcagctcttcaatttccattgcaatttttcttgattttgataacgattcgttgataatgcgatcagcgtttttctccgcttcccgaacgatcagctttgcttctttttgagaattgcgttttacgtcttcagccgcttcttgagcaactaaaattgatttattcaatgtctcctcaatattggcaaagtgtccgattctttcatcaagctcattgactttcgcttcaagctcagttttcttgcggagaacaatttcgtaatcttttctgacttgggctaggaattcatttacttcatcttcatcatatccgcgaaaactttttgtaaacgtcttgttgtgaatatcatttggcgttaatggcatgatgccacctccatttttacatttcagtacggttatctagttcacattataaaacaaatttcgcacagatggagaaaaaaactgaaaaaccgactatttttgtcgttcaaacgtaactctccatttgtcttttttggtttttccttcgatttttgttaagctgcaccggccaaaacctctgatagacagcatgtccccttccgcgactatgtatgaaggatcttcaaccaccttccagttcactttcacaaggccgtttttcacaagcgtctgtgatttctggcgggattgcctgctcatagaggcgcagacggcgtcaagccttaaagaagaaaccgtgtcatctcttatttcgacatcaactgctggaatgttaaggtctgacaagtcgattttctctaggctgaccgccgctttgcctgcttgggtcagctgtgcagccacaaaatcagcggtatcggctgagacaatcaattgcactgctgtctcagaaaacacgatgtcaccgaatttttgccgctttaatcctatgcccattaatgcaccaagcagagaacgatgatctactgagacaaacttgtcagcataacggacgttaaacgcctgcagttcaaaatctgattcttccggagtaatgtactctggaaacagaatcgcccgtttccgctccgctctgtcatagccgccggaaaaggcaagcccgacatctgcctgtcccgtaacagcagagaggatgacctgctctcggggatctaaaaagtcggtcagcttcatccggtactgctcctggacaattcttttccattcgagcgcttgatcaataaaggcccgctcgtcttttctgaagtgctgatatatatcgctcatcgtctttcccttctatgtaaagaggcttggctgctgccaagcccctatcaaactgtcacattaaaacgcaatcatgcgataaagtccccacaagccggttgtcgcaaaccgaagcacaagtattgctacgattggtgaaatatccagcattgcaatcggagggatgatttttctgaatggttcgagatatggttcacaaatcgaagccaaaaaacgcccgactgctgtttccctcgtactcggcacccatgacataaaaatatatatgatcagggcaaatgagtatattgtgattaataagcttaaaaccgaaaaaacttgataaaggatcatctcgctttaccacctctgatgttcgtcttcagatatgagctcagaaattgtgcctgatacatctacgttgtcaggcgtgcagaggaaaatatctgagccgattctttgaatatcgccgccaatggcataaacggttccgcttaaaaagtcaacaatccgcttcgcctggtcatgctgtatccgctgaagattgacgacaactgcccgccggttcttcaaatggtcggctatttcctgcgcctccgcataaacgcgcggctcactcaacaccactttagaggatttctgaacactttgcaagctcactacattctgtttgcccgcaggtttattcccgttgtaagccggcttttctttttgctcatgctcctcatgagattcccgctctgtctcaatatattcatattcgtattcttcatcttccattgagaaaaagtttttcagtttatttttcatactcattgctgtacaccccctgtttcatttccgactaacgatgagccgattctaatataagtagctccttcttcaattgcaatttcaaaatcatttgacatgcccatcgacagttcagtacacggagcgttcggctggttcagcttctgaacctggtcacggagttctctcagcgacctgaaacagcttctgatctgatcttgatcatcagtcagcggagccattgtcatcagcccggcaacaaggatatgttcgaaaccggaaagctcctgtatgaatggaatgacttcttcttttttcatgccatgtttagaaggctcaagagaggtattgacctgcacaaagcatcgtacagtaccttcagcccgtttttcaatttctttcgctaatgagagccggtctagggaatggatataggaaaccgaattgacgacagattttgcttttcttgattgcagactgccgataaaatgccattccggattccctttcatcaattcctgtttgcggagcagttccgcatcccgattctctccgaggcaggtgatgccagcatctactgcctcctgtgctctttcaggtgatacatattttgtgactgcaataaccgtaacttcatcggagctgcggcccgatctgttacatgcttcgtttattcgttcgtttatatgtcgtaaattatcaacaacacgcaagatcttttatgcctccttcattccgataaaggacatcatccgtccagttttcccctgatcgcggcgatgagaatagaaaagagacggctcgctttccgtgcataaaccgctgacagaaatttgttcacttgccaaaccgctgtccatcagtataagacggttcagctctttcagatcaagctgatattgtgcctttgccgtctgattggcggcaaggtctgctgaaaccggcaatgcgcggacagcatccatgacgcggtcgtctaccgtatagcatgctccgctgatagacgggccaataacagcgtaaatatctgagggatttgaaccttccttctcagtccattgcttcaccatttctctgccaatctgtttgacggtgcctttccacccggcatgggcgactccgacaagcgacttaaccggatcataaaagaaaagaggcacacaatcagcaaagcataatgctaaaaatacatttttttcatttgtatagatcccgtccgttgcttttagagccgtgtgatactcacgggcgccttttcccctatccctctgcgtcactttctgaacgcgattatcatgtgtctgatcagcgaatacccaagactgcaaatcagtattaaacatatcggcaatatattcacgatttttaactacatctgcatctttgtcatgaacgtgcaatcctgtatttaacgattcaaaaggcttttggctgacaccgccgttttttgtcgtaaatccggcaatgacctctttgttgttttgattcgtttgagcccagtcttgtatcatgagtgtcgagggtgtggtaagactgaatgggtgatatgtattcatgatgatccaacctttcgacaaacatttaaaaaagcggaatttcccacttattttaccacatcttactgcattcgttgagcgccgatttgcatatttctaaatgaaatgtgccggaagaatcgagacttccggcatttgccaatctgcggcagacaagcaggtttatgcatgtggttcacttaatcggactaagattacatcttccccgatttttactatatttcgccatggaatgaccaattcctcttcttttccaaaaaatccgagaactttcccatttcctccgagtatgatcgcctgaatttttccagtggtcacattgatatcaatatcaccaatactccccagcttttttccgtttgagacattgacgacatcctttacctgaaattctgaaatgctgatcattccatcacgtcctttttccgtccttttgttcaagtatatgaacgggcaggctgaaccttgtcagcaagaagaaattttcatgtcattgttcttttttccggctgcaccagctgatgataaaatcgagtataatttttgtatactctactagctgctcaatcgataccttctcgttcacagagtgtgcattgtgcagatctccaggaccgtatattacgcatggaataccggcatcatacagccatccgccatctgtaactgattgagaaacgtcaataattggacactcccgtttcactttctgatgagaggcagttagcgctaagacgcctgggtggccagggtcaacttccaatgccggaaaaatttctcccctgtcttctatcatagatgagcctccccacttgaatacagggcggttttccctaagccaaatatcactgtcactcagccgattgacgtaatcttctatttccgctgccacttggtcatgggtttcattcggataaaaatggactgtgatccacagccggcattcgtccgctataaaagccgcatgtctgccgccttctataactgccgggttaatcgtatttgtgcctggtttaaaaccgggataacttttcataatagaccagtggcgctcaagttcaccgagccccgcaatgatttttgccattttttcaattgcgcttgctccgaatgttcctccgcctgcatgaatcatattccgtctcgttccatcatgaaatgtttgactgcttttgatttcgatccagcctgtaatgacaccgccttggccttgaatatgcatatcgctcgtatccgcgacaattgcaaaatcagcgtggtagcccctcttgcagcattcaagtgtgccggcctctccaacttcctccccaataaccgattgcagaatcagatcacctggaagttcaatgcttgcttcacgaattaatttgacagcaaacagcacacaagccattccgcccttcatatcggaagcgcctcgcccgattaagagaccgtttttttcaatgggatgaaacggatcgtgcttccattcttcatcctcttttacctctgccacatctacatggccattgataatcaggctataataatctgctgaatctgttccttttagcttccctacaacattgggatctccagggtacacatcccatttgtcgatcgagaatcccaattcatttaaatatcccgcaatccaagactgaatgccctctgtatttcttgcaggcggagcaggtgtttgataagaaatcagcgttttcgcaagctgaataagctcctccttatgttcttccacttttttttgcaaagagtatatttgttgatccaatgtaaatccgctcctattctttaaaatcaaaaaagccgtttcaaatgtgatgaaacggcttaataaaaacaaacggagtccgatgtactccgcttttcaccgcttccctccgctggcatgatccagatcaggtcaaaagggttgagacaaagtctctctcagcttcgcaaagcacccctaggatgaatctatatatatttgtcaggcattcgttatcggctcagctcttgttaaaaacggccgatcctgattccataatacatggattggcgtatcaaaaaaagcggaaagtatttgatcagtaagcatttcctttatttctccggatccaaaaacctctccctgttttaataaaagggctttatcaaagacaggcaaaatttcttcagcatgatgagtcacataaaggatagatggtgcattttctttgtttgcaatgtatgtaatcgtatctaacagcttttcccgggcaataaaatccagtcctgtgactggttcatccagtatcagcagctccggatcggccattagtgctctagcaatcaatgctctttgtttttccccttgagaaagggtttcatagcggcgatcggcatattcaattgctcccaagtcctctaacaaacctatcgctttttccctggtttccttacttggcgtttcatataacccaatcgaagcgtaagctccgctcaaagcaatttcaaaagctgaatctgccggatacaatttttgctgaagagctgctgagacgaggccaattttacgtctgagcttttccccaagctctgttttgccaaattcatggccgagcacctgcatctcgcctgatgttggaaaataatatgagcaaagcatatttaacagcgctgtcttcccggcgccatttaggccgtaaagcacccaattttccttttcttccaccttccaatgaatatctttcagtatccatttcccattccgttttagtgagacattgtcaagctgcaaaatcatcgtggtcctcctctttattgccttttataattgttttaattttcataaaactttgtacgaactaggataccttactttttccaaaacgtaaaccatccataatcaatagaaaagcctttaaaacaacatcgttttaaaggcttttcattattgatgaatatttttattcatttgtttgatagccgctttttcaagtctggacacctgcgcttgagaaattccgatttcctcggcgacttccatttgggttttcccttggaagaatcgctttctcaaaatcattttttccctatcgttcagccttctcatgccctcttttaaagccagctcttcaatccattgtgaatctgtattacgctcatcactgatttggtccatcacatagatcgggtctccgccgtcgttatagatcggttcaaatagagaaaccggatcctgaatggcatcaagcgcaaatacaatttcctcatgcggtacttcaagaacttttgcgatgtcttctgcagtcggctccttgcttgtctcactgattaaccgctctcttacctgaagcgccttgtaagcgatgtcccggagtgatcttgagacacggatcgggttattatcacgtaaatacctgcggatctctccgataatcataggtacagcgtatgttgaaaacttaacattgtggcttaggtcaaaattatcaatggatttcattagtccgatgcagccgacttgaaataagtcatcaacatactcccctctgttattaaatcgttgaatgacacttaagacaagacgcaagttcccgtttacaagcttttctcttgctgaatcatcgccttcatcctgcagctgcctaaacagctttctcatctcttcattcttgagtactggtaatttggaggtatccaccccgcagatttcgactttatttctcgacacttttttccctccctacaggagctgctgtacaacgttaagtatctccttgggtgggaaaaatatgcactgcactcagaccgaaaaactgtcgaaatcaggaaatccctgtaaaatcaaggggttctaaccataaaattttttacaccattttgttgaactcttttctcaacctttttataattcttttctcaagccgcgaaatataagactgagaaatccccatcatatccgctacatccttttgggttttttcttcttcaccgacaagcccaaaccgcagctccatgatttgcttttctctctcattaagctgttcaagcgcttttttcaaaagctttttatcgacgttagcttctatgtctttagtgatgatgtcatcgtcagtgccgagcacatcagaaagcaaaagctcattgccgtcccaatcaatattaagcggttcatcaaaggaaacctctgaacggattttgttatttcttcttaaatacatcaggatttcattttctatacaccgggaggcataggtagcaagcttgattttcttttctggattaaatgtattaacagctttgattagaccgatggtaccgatgctgattaaatcctctatattaattcccgtattttcaaatttacgggcgatatatacgaccagacgcaaattgcgttcaattagaatggcgcgcgccgcctgatcgccgtttgggagcttcattaacaaaacctgctcctcatctttagataatggaggcggcagggcttcactcccgcctatgtaatagacttcatcacttttcagcccaagtttcatcagcagcttataccagaggtgcgtcaaccgtaatttcagttttttcatcttcctctcccttctaaatgtcacgccgtttgagtatgataagtaacggacatttgcgaacattatgaaacgtgtttgacagccttgcccgaaagcattttcggatgaataatcgcgtcaaactctccatctgccgacagctttgttgtgctgataccgattaaacatttatctgcagaaatcatttcttcttttgtcataatcgttacgtgatccggtttaacgcataataaaaattgattttgctgaccaactcccctgtatggaatcaacctcattttatctaaaaagcgaaaggaatcatcgagctgttcgatggcttccaatgggtctgtgtttcgaatgatcatcgtttcggctgttccgaaaatcggctccagtttatcaatgtaaatgatcattaccggtgtttttgtaagaggatcgtacagctggttaccggaatcaatcaggcctctgacatgaagtgtttggctgcccaaatctgcctgcacgctgactcgttcctcatattgaatgttttttgtttcaatatcttcaattcttcttttagaaaaaaaccataatgctggaaagccaccaacaataaacaaccagctgatcgggtctccaaaccctgtttgattggtaatcatgacaccgttttgaacaatagaatttgactgcagcaaagaatgggctccgataattcctccccccattaaaaaagtggcaaaataaaaggaaaacaaattttgaaagaaaaaccgaaatcttttaaagccaaatgtcaccaccacaatcacaactgaaaaagctagcttcccagccggatgttcaacaatcggcgaaaaaggagtaaacatcaaaaggacaatactggaaccgatgaacgctccgcctaccagtcttcttttttttacatgccgttttaaaataaatgccgtgagcaaaagcaaaagtgcatcaaaacaaaagtttaacagccaaatgacatctaaatagattttcacatctgactcctttctttcttgcctcacgctgttccccttcttgcttcataagtataaagcaagctctgtgggaaagtctgtcaattaatgttgagaggaaaatacaatttttcagggaaatctgcttaatttgtcgaggaagtataatgagaggatataaaaaaagctgccaatgacggcagctttttttccacttaattttctgtgttcatattaagttttccattcgcagtttttcttgtttcatttccataatcatctcggacgatcacttctacttttgctccttttgctttaatagaagaagtggcagtccaatagccttcatatctccccggagagatttctcttaacgggagttcggtggcattttgcacactcgctcttgcattggtcagcggcatacgaatggtaaacgttgcatctaaatcctcagcgcttgagaaagcgattttcacagattcaccggcttttaagtttttatcctctcccggaattaagccggaaatgacaggcttgtcaaagttcacatcaatgactgtctttttcgtcgttttgttgcctgccaagtctgtagcaattaccttgatttcatttcttccattttccaaaagaatacgggctgagtatgaaccatcagctactgttgcttttttgccattcaccttgacgtctttcagattgtcatcggatacagcccctttgacagtcagcgtttctttatttgttttcccgccatcctttggattgtccagtgttaattcaggcttttcttgatcaagcgtgaccgtgattgggctggaggcatctgttgttccgttgtcagttgatgcagttgccgtcagctcattttcacccttgttgagtatgatgcctgcatggaacgtgccatccgcagcagctttcgtttctcctgcttctttctctccattataaatgtgtaccgttgtgccaggagaagcgtttccttttacagtgacgctatccttatttgtgtatgatttgtctgtcggtgaagtaatctcaggtacagcagcttcataatcaactaatgcgcgaatcatatagttgccatccgctttgtcacctggctgccactttccatctatatactgccagttgcggccggaattctggccggtttcatccattgccaatccaggtgaatacggatcaggtttcgactggatatatacgagataaaaatctttatcgaccataatcccttttgaactgagatctaccttagtccactcgccattgcgaagagcttccgcgttaaatggccctgcaattttcttgcccggtgctccgtcttttcctgtggcatcgtatacctcaaccttaaactctgtgccgcccggatcagggaactctgtatcccagaatctgaacagccctcctgtaagcatgcctttgtccttgccgtcagcgagcgtcatttttaccgcccatccgttaccggcagcaaaataggaattggcattctccgctgttccgtcatcatatgcaatttcacccggataaccgacgaaaggcttcaatgcagtttcttttgtaacatcaccttttaactcaacggaaaattcatcactgtaataacccggtgcagcgactttaatcgtataagcgccttcataggcctccagcatatattcacctttgtcgtttgtcatagccggttccaccgcagcatcctctacaacataaacggaagcgcctgttaccggctctcctgtcgttttattgatgaccgtgccttttaatgtgcccttcttcatctcttctaacgtaaaattagcttgtgtcgtctgatccgtctttaaagatactttttgtgttttcgactgataaccatatgcttctgccataagcgtatagtctcccgctttgtgcttcagcgtgtactgccctgtggattgatctgaatatgttgattttcctgtttccactacactgacttgtgccttgagcggcaaaacttgaggctgtatagccttgttctgatgttttaccgctgtgtttgcagatggcttagcctttttcggatttactggctttttcttttgctttccagacggcttttcgacgcccagcttattctttttgactgtttttccggctgatttgtcagaaagcactacatcatcaatataccagccctcttttgcaatgctttcatcagattgaaggttaaacatcacttgaatgttttggcctttataagccgataaatcaatttcttcgtccgtccagcttgatgtctttccgttatagacaccagcctgctcccaattcttttcaccttccggaagaacaaaaacgtagccgtaatcaaaatcatcctctaaattgtgccagcttttaaattgaaggaacagacttcctgaatcaggtgctttaataggaggcataacaaggttcatgtttgctgagttggcataatttcctgtcaaattcgttccatatactttttctccggatgctgctgtatttgggccagttgacggaactccccattcccagttattatttgttccgctcgcaacccagccgccgggtgcagtttcaaagtcctgcttatatcccgccgtgatgcttggtttcactgttacatcgtatacgtcagacgaaacgacatgaccgccaaaatcgtgaatcatccacttatagcttagtttagttccttttatatctgggatctctgcctgatacgttccttttagatgatcaccgctgattcgtttagccgttatttctgtccattcaccttgatcaagcttgtaggacagctttacagatgtcacactcacattgtcttcagctgtcaaagtcagtggtaggctgccaccttcataagcttcagttactttctcatgctgatagacaggaggctcttggtcatccccctctacagaaacttgtccttccgctttccctaatccatctgtaacagcggatacagcatcaaaagcattcaccagaccatggccatatccgttattcggtgaatcaggaaatgttgaatccgtgagcggttcagccgtgctggttaatatatcctccatctcatcaacagaaagtgaggcattcgcctgtttcagcagtgcagcaacagcggatacatgcggccctgccattgatgtgccgtcccaaccatcctcatatgtctgaccgggaacggatgaacgaatattaacgcccggtgcagatatttccggctttatttcatcatatggagatggcccttgaagagaaaagtcagcgagctttttattgatatcagtcgctccagttgcaaacgattctggatagtttgccggatttgcgatagaaccaggcccgccgggaataaagagatccgtattccccgctgaaaactcagggaaaatatcggccgcacgccaggcattgaccatgtctctgtaccattcatcaagtccagagccccctccccatgagttattgacaacatcaggagccatttccgggtggggatttccttccgcgtcctttggtgctaaaacccattcaccagcttccaaaatgtcagcatcagtgccgccatcttcagagaacgctttaacagcaatccattttgcgccaggtgctacaccgatttgatttgttccatcaggttcagagcccaccatcgtgcctgtcacgtgggttccatgagccaaatcatcataagggcttgcctcgcctgctacggcatcataccagttcatttcattttcaggctcattaggattttccggattatatccgcgatatttctcttttaatgccggatgattccattccaccccggtatcaatggacgcaacaaccgtgccagttccatcatatccaagtgcccaagcttttggggcatcgatttggtctacattccattccacaccgtcagttgctttaatagctttctgtgcttttttcatattaaatggggaggatgacttaaaaagctgccgtttctcattaggaagcaccttttccacttcgggaaactgcaccactttttccataacctcttttgaggcatgaacagcaatcccgttcaccacataataagaatgaatttggtctgcatttcctttatctttctgggtgttcaagtattttaggacatcttgctgggattcatcggctgtgacttttaaagatgacacaacagcagaacgcttttgatattccgtcttagcggcagacagcttcttcgatttcgcttttttaacagccgcttttgccgctttttctgggttagccagatctttaaatttaatcagaaaagtcgttttttctttctttttaaagcttttctttaatgaactcgaaatcttgttttgaatggattccgcagattgaagctcctttttaacagaaggtgaggtgactttactgcttgccccggctgctcccggaaacagcagtgaactgatgacaactgtacttaaaacagagctgatgagtctgtttttcgtttttttcctcattttcatccccctttttcaacatgctttttaaaaaaagtgtcgtccctccttttaataatgaatggtttgtcagaacatcgctgtatattaactgtagacaatctgaattacagatattgtcgtttcatgtcattcaatttccatatatatgaaaatgataaaaatgtcacaaaaataaatgggtctaattatctgttttgttactaagcgaaggaagcaatagggaaaaagactttataagaaggaaagtgtgaagagaaaaacaaaaaaggacaaaatcgaaaacgattttgtcctttacattagccgcgtttattacggtttcttaagaatgtcgggatgtcaagcgtatcatcagccggctgtgaagtatgacggcttactgtgttctgctgctgaggttcctcacgttttggctcacgcttcggaacactttgattgtgtgttttgatgctttgatttaagcttggacgctgaggcttcgtcacgtccttctcttgttcgataaagccggttgcaatcactgtcaccacaatctcatcttttagattttcattaataacagaaccgaaaatcatgtttacgtcttgatcagacgccgaagcgacaatgtctgctgcttcctgaacctcatataggctgaggtttgttcctccagtgatgttcatgaggacgccttgcgcaccgtcaatggccgcttcaagaagcgggctggaaattgctttttttgctgcctctgccgcgcgattttccccagtagcaataccgatacccatcaaagcagatcctttgtttgacatgattgttttcacatcagcaaagtcaaggttgataagaccaggtgtagcaatcaagtcagaaataccttgaaccccttggcgaagtacgttatccgcttcgcggaatgcttcaagcatcggtgtgtttttatcaacaatttcaaggatacggtcgttcgggatcacgatcagtgtatccaccgcttctttcattgccgagattccgcctgcagcctgaagctgtcttttgcgtccttcgaaggtaaacggtcttgtcacaacgccgactgttaatgcgcctaagtctttcgcgatttgtgcgataaccggtgcggcacctgttcctgttccgccgcccataccagctgtcacgaataccatgtcagcacctttaagtgcttcttcaatctgctctttgctttcttcagcggcttttttcccgacttccggattcgcacctgctcccaatcctctagtcagctttgcgccgatttgcattttcacttctgcttttgacaggttaagagcttgagcgtccgtgtttaccgcgatatactctactccttgcacttcattttcaatcattcggttaacggcgttgttaccgccgcctcctactccgattactttaattgatgctaagccgtctatgtttgtttcgaactccaacatgctaaatcctcctaatctgccgaatgactatctatctattcccaaaacatgcttaatagttttttcattttgctctgtttattatgttcggcttgtgttttttgttttccttttggccgctgctgcacctcattttggtgatgatgctgctcttgttcctcagatgatgagactgcgatttcctgtatcgcttcttcaggcatcttaaagcctatttttctgccttggattcttgcattccggcaggcgaattggatcaggcccactcccgtcatatattgaggatctcttacaccgatataattcgggcttgccactctgacattgttttgcagcacatcctgtgccaaagacatgacacccggcatagctgcttgtcctcctgtcagcacgaagcctcccggcagatcggtaattcccatactgcgaagctcttctgaaacaatttcaagaatttcctctactctcgcttcaatgatattcgctgcttcttgctgtgtaaatgtttgtttttgattggtgcctataacggttacctcaaatatttcatcttccgaggcttcgtcatagtaggcatgtccaagttgctttttcacgcgttctgcttcttctgttgacgttctcaatccgatggagatatctttggtgatattttcgcctccgagaggaatgacacgggtagaagtgagatgtccgttctggaatacggcaatggttgttgaccctccccctatatcaatgagagccacaccaaggtttttctcgtcctttgataatgcagcagaaccggctgccagcggctgaaggcaaatatcagttatttcaataccagctctttcaacgcagcggagtaagttatgtaagattgtttttgaaccggtgatcaaggtgccctctacttctaaacgcacacccagcatttttttcgggtcggtgatttcatctcttccatctacgataaactgtttaggaatgacgtcaacaatcagctgttcatgcggtacggaaacaacctgtgccgcctccatgacacggcgtacatcttcaacctgaatttctttattttcactggaaactgctacaacaccgtttgtatcttgaatattgatataatttccattaacgccgacaatagcttttctaagcggaaaacctaccattctttcagcttggtcaaacgcttttcttatagaatgaacggtctcatctatatcaacgattgagccttttttcaacccttcagacggtacatttcccacaccgataatattaagggaatcatctgtcatttctccgacgatcacttttgtattggacgtaccgatgtcaagactgacgtaaagttcattgttgttcattctatggcacctcctcacatttcgatcatttctattctattatttgcggaacaacaatacaatgaatgtggctttacaagtgtgtaacaaaaaataacaacagaatatttttatgtgcttttcacattttatgtttattgaaaatattcgttatatcctatgtatatcctcttttatatcacattttttttattttttttagaaagagtccactttgttagtagatttcttctgataacggctatattctgaaataatctgactccaaatgcgaatatacctgctaaatacaagtctacaccaagatggactcccagaaaagctaaacttattgccaatataatattaaaaaagaaaccggaaacaaataccatttcatcatatgtaccttgtaaatgcgccctgattccgccgattaatgtatcaagtgcggcaagcaccgcaagcgataaatagtttgagtattcactcggtatcgttaagtttgtcattagtccaatcgctattccgagcaccagtcccaacacgggcagccacatgacaattctcctccttttcagtctttaagcagtttcagctgttgtacgtccagtggtctgtcatatgcttttaatgttagtttgctttcagatttaccggcttttaatgctaaattttcagatgcaaaaagatcctcaaggcctgaccccttcactctgctgtgtaacatgtccggatctttggcaagcacttttactgttaaaggataatcgtcaagggcgtatccgtctatttttgtagtgccgtttatatctctgatgactgtatgattcacaactcttcgctcattaatcgagatatgctctgcaccgtaggagttgagttcatttatcagctttttcagcaaatccggaggcggattttcgatcggctctcctgttaagctttcagaaaaaagcggggaaatcgtaatgacaattccgctacctgttatatcggtcatgccggctgttttttttaaggattgcaaggtattatttagcgcggtttcttttgtcatttctttcgtttgcgaatagctattcagcaatttgtcatatttgtttatttcagccagcagcttttcctgcttcttctgctctgatgtcagctcttccctaatatcccacatatctcttgtatcccggactttggggtgctttaacgaattaaactgaacagatatcatcaggccgaagatgaccataagaacactgatgcttatgaaggaacgctttattttcaatctatttcacccgctttttcagtcattccttcgttttcagaatcggtttcatttgtacgtttttctctttttctgccgacacagaaatatgatccattgacagctgatcaattaggcctccagcgatatttaacgagggcagcaggacatctggatctccaatagcggataccgtaaacggagcgggatgctgcaccccgtctaccgttaccacaggaccattgcatttgatatacgaatcatgcgtcaaacgctgtccattaacggcgacagctgccgctcctgagatatacagttcgtttactacttggaagatatggctttcgtgaacgatgtaactattcacattctccccttccggtatgtatgacgcatcttccaatgtcacctcaacgccttctccctgcacaccgacttccccaatatacatcctgtatttttctgtatcttcgaggacattatagtattccgacttctctttcttcagcttattttccgcctggcggactttgttttgcttttgatataattctttttcaaacttcttattttctttctcttgtttcagcagttcatctctcagcgcatattcttttttccactcttccgtctcagccgcgcttttgttgttttcttttgtcatttgaaaagaaaatgaaatcaaaaaacctgcgataagcataatcaaggaaagaaggactgctgatttgcccctcaattttcatcttcctttttagcagctttatcgtttttcccaaactcttcaaaataggtggcaacttctaaatgaatgattccttttttattgctgcttagctgtgagatgatagaaggatacgtcttcattcggtctgcaaacgttttaatagatgccgtaacaacataaccgtcgttcatgtacaacttaatacggttttcatccatttttacaggcgtataataaatttctgaaatcgactgttttaacgaatttgacaacgcatcgagctgcttggccatttgagaccgcttcttcgcgtttgtccaattcactaaaatcggtccggcatcatccggcgttacttcgtttggcagaactgagccgttttcaagcacttcatagtacacatcgtctttttctaaataagcaatcgctttatattcttcgattgcaatgttgattttattaggaagcgatttgctgatctccgcttttttcactaatttattttgctgaatcttcttttctgttttttgcttgtccaaactccaaaactcagtatctccgctgttaatatcggaaaggtcgataatttccttttttgatacattttcattccctgtaacagagattgttgatactttactgattggtgtttgcaggtacacaatgatcagcaccataataaaaaagagcataataaatgaaatgagacggcggtttgccttttgtttcctctgctctttaattttagggatccgctcttcaatgttaacgattttttctcggtcttgacccgggttcattgcctgttcacctcattcaaatgaaacagctgttaaaagtctgtctattccaaaacaaacggcatactatgatgccgtttgtcgtttgcttacagtatatcatatgaacagcttcagtcagaacttgaatcagcgatttccgccgatgatttcaacctctgtgtgcatatcaatctcgtatttttcacggattgtctttttcacatggtcaatgagatcaagcacatcttttgctgatgctccccccgcattgacgatgaagtttccgtgcatctccgatatctttgcaccgccgatttgatatcctttcaagcctgctttttctacaaggttcccggcatgattcggaagcggatttctgaatatgcttcccgcacaagggcttgaatacggctgtgtattttttctatagtctttattgctttgcatttgctgaacgattgattccttatccttctgctcaagctgcaaaacagcttcaaggcaaacgcccgggcgtttcttttgcagtacagatgtcctgtagctgaaatccatctgctcatttgtcagccactcaatcgttccgtcttcaaataaaatatgcgctttgacgaggatctcgctcatatcagaaccgtgagcgccggcattcatataaaccgctccgccgactgatcctggaatgccggcagcaaattccaaaccggacaggccttttttgctcaatgatgtagcaaggcggaccaccgaataaccgcctccgactgttacttgttccccttcaagctccaaatggtcaagacccgcccccagcttgatcactacgcctctaattccttcatctaaaacaagaagatttgatccgcggccgatgactgtccacttcacatcatattttttaatcacgtccatgatgtctttaacagcatccacactgcttggaatgaccaatacatccgcaggtccgccgattttcatcgttgtatgattcgcgagcggttcatttgcaagaaccttgccgacttctcgttcttttaattcctgtatcactttctccatcgtaaacctccgcattccatttgcttttctactatttttttaattcctcgagtacgctgtataaacgggcagccgcgtcaggaacaccgagtgactttgttcgttcgctcatttcctttaacgtttgctcattcagtacaatccggtctagcgcttcaatcagcttctccccgctgagctctgtttctttcagtacaatcgccgcatcatgctggccaagagacctcgcattgacctcctggtgattcgctgtcacatatggacttgggatcagaacacttgggattccgagagcagtaatttcggcaatcgttgtcgcaccggctctggccacaatgacatcaatggcctttaaatactcaggcatttgatgaagaaacggctttgtgaccatattatcagcggcacccttgcttttcagctcattcattactttttcatagtgaacttcaccggtgatatacagcacttgatagtctcttgttttcagcacatcctgcatgtcaatgacagcgcggttaatcggtgcagcgcctcggcttccgccgaaaattaagaccgtttttttgtcttcagaaagcccaaattcagccaatgatcgtcccgtctttattgagacgacttcagaggctctcgggtttcccgtaaatacaactttctcgctaggaaaatgtgatttcgcttcttcaaaacaaatcgctactttattaacatattttgaaagaaacttattcgtgatgcccggcaggctgttttgttcgtggacaatagtcggaattcccattttcgcagcggcatagacaaccggcccacatacataaccgcccgttccaattacggcatcgggcttaaattccgctaaatacgatttactctttttgacgcccttcagaaaacgcatcacagtcttgacattttcaaatgacaattttcttttaaatcctgtaatttcaattgaacgaaacggtatattctcccgctcaacaatttttttctccagcccgttttctgttccgatatataaaaattccacattaggatgacgtctttgcacttctttaataaaagcaagagcaggataaatatgtccccctgtaccgcctccgcttattgcaattcgcatttcttttttcccccagtctaagtttctctataacataacgataaccctgttttgttggacagggttatcgcatcaattgtttccaagcttcatgttagacaggaggcttggaaatacattcgttaatacctcgagtagcggcttacattcagcagcacaccaactgccatcagcattagagtcaatgaagagcctccgtagctcagaaacgggagcgtgatgcctgttacaggaatcaggcccgtgactacgccgatatttatcatgacttgaatggcaatcattgaaataatgccgactgcgacaaagcttccgtacagatcaggcgcaccaagcgcaattctgattcctctccacagcaggacgctgaagaggagcaaaataagtgttcccccgataaagcccagctcctctgacaagatggcgaaaataaagtctgtttgcggctcaggcagataaaagaacttctgtctgctttgtccgagccccattccgaacaacccgccgggccccactgcataaagcgattgaatgatctgaaatccgcttccgagcgggtcttcccatggatttaagtatgaggtaatccgctttatccgatatggagccgatagtacgagcccgacaaatccgctgaggccgatcagcccgagaaagacgaaatgggcgatccgtgcgccggctacaaaaatcatgacaatacaagttccgaccataactgtccccgttccgaggtcaggctggcacatgataatcaaaaatgctgaaaacacgatgccaagtgcagggacgaacccccgtctgaacgatgtgatgtttttttgtttttcagagagaaatttagcaaggaatgcaatcatcgcaagcttcataaactctgaaggctgtatgctgaatgctccgactccgatccagcttcttgaaccgttccgcaccattccgacgcccggtatcaaaacaagcaccagaaggaaaaagcagataaccatcagcaatttggaccatgtcctccaagtccaataatcaacattcatgataaaaaacatagcaatgacgccgattcccgcaaacaaaagctgccgtttcgcgaaaaagaatgagtcgtcaaatttataatccgcccataccgcactcgcactgtacaccataattaatccgattgttaataataataacgtaatgatgaccaataacaaatcaggcgatgtttttttagtagtcaaagcaatcgacaccccaagcttaaagtcattagggctgccgatttacttcaagacaagcccttacttaagcatatgcacggcatctataaacatgtcaccgcgttcttcaaatgttttgaattgatcccagctcgcacacgcgggtgacagcaggatgacatctccttcatttgagagcgcaaacgccgcagatactgcttgttcaacattatcgacacgtttgacatgttgtattcccagttcattgccgagtttctcgagttttggcgccgtctggccaaatgtaagcactgctttgacatgcttcatataaggtttcaagtcatcaaaaccatttccgcgatccagtccgcccgcaagcagaatgaccggcttatcaaaagctgaaagcgccttgcttgtcgccagaatgtttgttgctttactgtcgttataaaatttgcggccattcacagttgtgacatattggaggcggtgcttcacaccagtaaagcttgtcagcacctttttaaccgcctcattggatgctcctgccgttttcacaactgcaatagctgctaaaatgttctccaggttatgagcaccgggcagtacaacctcttccagaggaagaatggcttcgccgttaaacataatcatactgtcttttacatatgcgccctgttcaagcgttttgctgactgaaaatgggacgatttcggcttttccggcttcagcaagacgcacgacggtttcatcatcctggttgacaatagctttatctgaagcagtctgatgaaggtacactttctgtttcgctttttcatagttttcgcgcgtatggtgataatccagatgggcgtcaaatacatttaaaatcaggctgatttccggtctgaaagcgtgtgttcccatcagctgaaacgaagacagttcggtaacgatccattcatctccatcagcatgataggcaacctcacttgcgactgtgccgatgtttccggcaatcagtgctttttgcgagtcagccttgagcatttcgtaaattagcgttgtcgtggtcgttttaccgttcgatccggtaatcccgataaacttggcgctggtcaggtagtaagcgagctcaatttccgtccaaaccggaatacctcgtttctctgcttcctgaaccatgatattttcataaggaattcccgggtttttgatcagaatcgtgatttgatgctgatcgaacagagaaactggatgctctccgcaaacaacttcgattcctttttcagaaagcttttgtgccggttcattttcttcaaaaggcttttgatcattgactgcaacataaatgcctttttcatgaagaatggaggccgccgcatatccgcttttcgcaagcccaaggattaaaaaatgctgtttctgtaaaaattgatcattttccacttataaccacacctcgatgtaaattcctaaaacggcaagcaaaagtcccgcagcccaaaacgtcacgactactctccattcagaccagccgacaagctcataatggtgatgaagcggactcattttaaagattcgtttacctgtcgttttaaagctgatgacctgcaaaataacggataatgtctcgataacgaatacaccgccgatgataaccagcaggatctctaatttcgttaaaatggcaatggtaacgatggctcctcccaatgcaagcgatcccgtatctcccataaaaactttggccggatgagcattaaatacaaggaagcccagaactgcaccgacaacggcaactgagaaaatcgctacgtcatattgagactgattccatgccagaatggcaaaggcgccaaaggcaatcgccgcagtaccggataataacccgtcaaggccgtcagtcaggttaactgcgtttgatccgccgactagcataaagagcacaaggataaagtaagcccagccaagatcaaatgataagtcagttccaggaatgcgaatatccgtcgcaaaattgtagtaatgatacacggcgtaaaatacaaccgcaataataatttgtccgatcagcttttgctttgatgtcaatccaagattgcgcttcatgacaaccttgatgtaatcatctaaaaagccaagcaaaccgtagcctagcgtaacaaacagaagcagcaccatttcggggcttatttctgaaaacttctgtgtcataacaattgttgtcactatgatagaaagtatgatcatgaccccgcccattgtcggtgtccctgattttttctgatgtgatttcggtccttcttctctaatactctggccgaattttaatcttcttaaaaacggaataagaatcggagagagcagaacactaattaaaaaccccattaaaattgtaaacagaatgacttgctcaagcattgtccttttctcctcctgtttctttcaaacgacatacgtagttatcatattcatgatttttttccatatgaaaaatcttttcaagctccattattcagtaacatctctttcctatgaattcgtcttattcttattgagttcaacaatggctctcgccgctacttcagcatcatcaaaatcgaaagtttcatttccgatctgctgataggtttcatgtccttttccggcaatgaggacaacgtcgccttttttggcattggcaattgcgaaaaagatcgcctgctcgcggtttgcaatactgtgatagtatgcgttctctactccggcttccatatctcttaaaatcgcgcgaggatcttcgcttctcgggttatctgacgtgaaaatcggctcgtcagccagctccacagcaattttagccattttcgggcgcttcgtcttatctctgtctcctccgcagccgacaacgacaaatagctttccttccgtcatgtctctgcatgtctccagcacattttcaaggctgtccggtgtgtgcgcgtagtctacaatgacaggaaactcctgctgctgattgaccaattcaaaacggcctcttacaccatgcaattcttcaacagcctcagtgatgatttcaaacggtatgcctgctgcaatacatgtcgcaacagcggccagcacgttatacacattaaattgtccgacgagagacatcgtgatgtgcttcgtgcctttgtttgtcacgagatcaaagcttgtgccctgtgcagtgatactgatgttcttcgccatcacatcagcatcgtttttaattccgtatgtagagatatgcgcagctgttaccttttcaaaataagcgctcgcctcatcgtcagcattcaggacggcacgctttggatgttcatggttgaaagccccgccaagttgggaaaagagcaagctttttgcatgccggtactcatccatcgttttatgatagtccagatggtcctgtgttaaattcgtaaacacggcaatatcataatcacagccatggacgcgtcctaaagacaaagcgtgggaagaaacctccatgattgcagtgtcaacgtgcttgtcattcattttcttaaacgttttctgcagcgtgacgctttccggagtcgtgtttttaacaggaagtgtttcgtctccgattttcatgtacattgtaccgatcaagcctgtgcgttttcccgcttttttcagaatctcatcgaccatgtgggtcgttgatgttttgccgtttgtccctgttatcccaatcagctgaagcttcttcgtcggctgtccgtaaaacgcatcagacaaaacgctgagcgcgcgaagtgactgccggacaataataacaggaacattcacatcgacctctctttctgccacaatagccgctgcaccgttttctactgctttttgcgcaaaatcgtggccatccaccgtatacccttttacacatacaaaaagactccctttctttacttccctggagtccatctcaattgaagttatttcagggtcttgtgagtcgtttacagaaggttcggttgttaagtatgtaagcagctttgtaagtttcatcgtatcaaacctctcaacattctaattcgttctttttatcattgaagtcacatcaaatgatgtggtaatgattttaagcatacagttcatattttagcgtaaataaaaggatacatccagctaatcttgaaagatatcagcattttttctgcaataaaagaataggcagcccgaatcaatcggctgcctccttttcatcttcttcagtcaaatacacgcgtatctttgagccttcttttactttcgttccggcagctggcgattgtttaacgattttgctccctttcccggaagcatccacattgagattcaccaatagtgactcaagatctgagacagacatccctacaacattcggaacttctattgtttttgtgtcgttccattggtattttttctcgatttgatttttccggggcttcacaccaagttccggcagactgtctctcataatatttccgacaataggcgctgccaccgttccgccaaactgaatcgtgcctttcgggttatccaccgcaacgtagacgactagactcggatcatctgctggcgcgaaaccgataaatgatacaatatggttgttttcaagatattttccatctttaaccttttgtgcagttcccgtttttcctccgacacgatatccttctacaaatgcattgcggccggttccttctgcgacgacgctttctagagcatagcggatttgtttggatgtttcctcagaaatgacttgtttctttgcgattggtgattgttttttgaccgttttcttcgtaacaggatcgatccattcctttgcaatataaggtgtatagagcgttcctccgtttacagcggcggatactgctgcaacctgctgaatcggcgtgacggatactccctgtccgaaagccgtagttgcttgctccaccgggcccactctctcaagcgggaataagatgcctgttccctcgccttggagatcaatccccgttttttgtccaaaaccaaagtctttgatatatttgaaaagcttttcctttcctaagcgctcgcctaattcaacaaaccccgggttgcaggagttctgcacaacttccagatacgtctgcagcccgtgcccgcctcttttccagcaccgcagtctcgctccgtccacttcagcatgccctttatcataaaattgatcccgtttcaaatttactttttgctcttcaagggctgctgcaagtgtaataattttaaaggtagatcccggttcatacgtgctccatactggcagatttcgattgtagacggacggatcaacagattggtaatcagcagggtcgaagtcaggcctgctagacatccccaaaatttctccgtttttcggattcatggctacggcaatcatgccgtccggatgatatttggcctcagcgttatcaagctctctttccattatcgtctgaacctttgaatcaactgtcagcttcatatcaagcccatccttaggcggcgtatagtcatccgcttcatcaggcatcttcttccccttggcatctgtataaaacttaacagaacctttttccccttttaaatcatcgtcgtaataggcttcaagtccaaggagcccttggttgtcaattcctgcaaatccaagcacatgagataaaaagctgccgaacgggtaatgacggatactgtcctccgcaacatacacaccttttaaatcaagcgctttgatttctttcgccttctcatttgaaatttttctcccttcaggagtgatcttttcgattgacgctttttttgtcacatgtttatatactttttcttctgacatattgagcaccgccgcaagctgcttgctcgttttcatcggattctgaacttggcgcggcacgacgaatacggtcggcgcacttttatttgttgcgagcttcacaccattccgatccagaatctcgcctctctccggctcaaacggcaagttccggctccaggaatctttcgctagcgaagtcagtttttcgcccatcacaaactgaacataccccagccttgtatcaatgatcagaaacacgatcacgccaaaaagcaaaacaaataataaacgttttctaaccgttacattcgagacgcgcaagagaccgttcactccttatttaggcttgtttcattttatgcctgaatttggacaggtagaacgatgctcctctgaaggcataaaaaaagaaagcctgcataacgacggctttctttttaatcaggatttttaaacttaaccttgattacggttttgtctttgatttctttgtctttcttaacactttggctgacagcgtagccttgtccgcttacttcaatatgaattcccgcgagctcgccgtactgcagaacctctcttctcgaccagcctgtcatatcaggcattttgattttgccgcccgttttcaggaagaccttttgattggtgagaacttcctcatccgctttcggatactgttcttttacagcgacatcactgccgatgacaattggtgtgagattctcctcttttgctttcttttgagcagcagctaccgtttgatctgttaaatcaggcattgtctgcgcttttgtttcttccttatctgagtcagatttttcagttggttcgatgtttaggtagtgcaggctatttttcattgttggattgaagatttctgatactggatctgaactgctttgtcctgcttttagttgcggctgctgtacagcaacataaattaaaagctcaggatcatcttttggcgccatacccataaacgaaaagatatagttatctgtgccgtctaaatatccgcctttaccggctatttgcgcagtacctgttttcccggcaacatcaaaaccttcgattttataagcttgccctgttccgatcttcgatgtaacgacttctcctaatatatcccgcacctttttcgcagtacttgcagaaattggagttccggctgattccggcttattttgataaatagttttatctttatcagggtcaacgatatggtcaatgacataaggtttcatcattttaccgtcatttgcaattgccgttgcggcctgaatctgctgaattggtgtgaccgcagacgcttggccatatgcagttgacgccttatcaaattcatatttaaagttgattttgctggagacttctcctggcaaatcaatacctgttttctggtaaaaattgaatttgtgcaaatattgattgaggcggtcatatcccagcttttctttcgccagtttcgcaaaagcgacattcgacgaccttaggacgccgtcatgatatgttgtcggaccccagcctacaccgttattgtgatccttaacaggtgctccgccaacttcaaatgtccctgatttatatttttcgttcgcattaaacacgttttcctgcatcgcagcagcgagtgtaaagatcttcatcgtggacccgggttcatacgcatatgaaatcaaatcattatagtagtttgtcacatcgcgcttgttcggatcaaagcttgggcgctgtcccatggcaaggactttgcccgttttcggatcaacgactgcggccatgatttttttcggattatacttttgcgccacttttgtcatgctgtcttccaaaaaggtttgaattttctggtcaatggttaaatatacattgtcaccattttttggcgctgtaattttatttttgctgttcgggagctcccagccggatttgtcgctttcatatgtcacatatccgtcccgctccttcaaatacttatccagcactttttctaatcccatcgcgccggaaatttcatttgtttcttcatcaacctcggcatagccgattagattagatgcaaatactccgtttggatagtagcgttttgtatcccgtaaaaatgaaatgcccgggagtttcattttttcgattttttgcttttgtgaatacgtaatatcccggccagctgagccaaactcgacttgttttgcatctttatttaagatatcaaggatgtcggccttgtccaagtttatcactttagacaatgcttccgccgttttttctttgtttacaacatgctgaggatgcttgacatcagtggtcatttttttatcgagaatcgcaatcagtttatacgtcgctgtgtcctctgcaatgacttttccttttcggtctaaaatcgagccgcggctcgcttcgatggtccgtttcttttcatgctgctctgtcgcttttgtcgcaagcacttcgccgttcgcttttccggttatttgaatatatgccattctccccaggatgacaaagaaaaagagagcgaaacaaatacttagaatcgctgctcctctattcataaatttattcttttttggcatttgaatcattcctgtatgtttttcacttttttatcttttaaattcaagccgttctttttcgcaatgtccataatgcgctgcggtttgcttaaatcagcaacgcttttttcgaggtcaccaatttgcttattttcggatgaaatttgctcctcaagcttttgcacctcaatattggtttgatatgccgcatacgccttcgatacgatcaaaagcgatacgctgagcaccgccgcagcaaagaggacaagaagcactttttctccgagagtaatggaagcccttttcttgacaatcacttttttctcaggactgatcgcatgccgctgctgtttctctggttggtaagctaaattgctcataggctgatgacctccttttaattttgcgttcgcgtttcgttattttcttttttcagcaatccgaagcttggcagaacgagcccggttgttctcttcaagctcttcttgagatgccgtaatcggttttcgtgtgatgagcttcagctccggttcaaactcttccggtataacaggaagtcccggaggaagttccggaagcgacgacttttctttaaaagtggttttgcaaattctgtcttctagcgagtggaaggtaatgaccgataccctgccccctggcttcagaacctcaattgcctgctccaaagcttcttcaaacaccctaagttcatcgtttacggcaattctgattgcctgaaacacgcgtttagcgggatgtcccccgctccttctcgctggagcgggaatcgcgtcttttattagatcgaccagttggcccgtagtttgaataggagacttcattcttgcctcctcaatttttctggcgatctgtttactgaacttctcttctccgtatttaaagaaaatacggacgagatcctcatagcgccactcattaacgacttctttcgccgaaagcgtagccgactggtccatcctcatgtccaacggtgcgtcatgatggtaactgaatccgcgctccggtgtatccagctgcggagaggacacccctaaatcaaataaaatgccgtctacttctgtaacgccttgttcattcaaatattcttttaaatacctgaaattgcttttaatcagaatgagctgtcctttataatcggacaacacttctttagcatgctgtaatgccgtatcatcttggtcaaaagcgattaaacgccccttctcggataactgctgcaataagtatgtactatgcccagctccgccgagtgtgcagtctacatatgtaccgtctggtttaatattaagtccgtctacggtttcacgaagaagtactgtcttgtgttgaaacatattgtgttggtcccaccttttatcaggatgaattgaaattgtttttagagtgttatacacgaagaatcattatatatcaaacccaatcatgttttcagcaatttcagcaaatgaatcttcttgctcttctgtgtattgttcccaaattactttactccacaattcaattcgattagaaaccccgataacaacacattctttttccagtttggcgtaattcaatagagatgatgcgatatttaccctgccttgcttatccagttcgcattcagtcgcccctgaaaagaagaaacgggtaaacgcgcgggcatctttctttgtgagaggaagagcttttagtttttcttcaatttgtttccattcgtgcatagggtagccgaagagacattggtcaagtcctctagtcagcacaaattgctcacctaggccttctctgaatttagcgggtacgatcatgcggcctttcgcatcgatggtatgctgatattcacccataaacatgatctcttgccccactttctctccttaactcaccactattcaccacttcgctccacaacttcattttacactgtttacccataaaaaaaaaccctgaactagtcagggttctttaaaactttatttcaaagtttgacaacttgatgttgattttgaaaagaaaatggcagattcttgaatgtcgtgaagaattttggaccgtacctgttcaaataatacatgatattccaaatccgttcttgcggcgcaagaagcggcttaatgctattttgaattctttcataatccttcaagacgtagccttctttttcttcaattcgcttcatcaccgtgcgctctaagaattgaagctgatcctgaataaaagcggcatttttcagaagtaaaggttccaagctttgatcaacctttaacgcctcctgccggaccgttttgtgaatcgcttcaatttggcttttcgcctgatccatcaccgccgtaaactcttccggaatctggcgctcgaagtatgtctctctttgattctccgttccgcgctcaatcgcgtcttgtaatgagatattccgttcagccagttttttctcaatatgccgctcaagtatcgtaatgttcagccttggcatgacaggaggcattttgaagcccatcaccgcaaatgcctgtttgagctcgccccaataattgatttccccaggccctgcaataaatgctaaagtcggaatgagaaattcctgcattaacggtctcgttacaacattgttgctgaaacgctctggatgttcttccatatgtgtatgaagttcatccctcgtccatcctagatcaagctctttgatgacaaatcggccgttatctttttcaattaaaaaacgctcatcttcgtattcataaaacagattcgcctgctcttttccggactcgataatcggtttgtagcctgcttgacgcatgaaggcctgctgatctgatacagcccgggcgagttcatcattttctcgaagaatcttttggaacatggccgtttccagctttttaatccccggatccccagaatttaataaaactaagccctcttcttggaacaaatccgcgatcagcagttcaaagaagtcagtaaacgtaacagattcccttaaacatcgtttcacattgtcgagaagtgtattcgtatggtctgtttcttcaaaagcggcaaaaacatcatctatccacgcggcacacttttcctgatcaagcgatgtactcgctgctgatgatttcttccaataagactgaggcagcttttttttcacaggcccattctcttcagatgtgtgaacaaaattaatctcatccaaatcgtggtcttctccagccacccagaagattggtatgacaggcacttgcagttccttttcttgttgctttgctaaaacaatgattgaaatgattttatgtatggtgtaaagcggtcctgttaaaagtcctgcctgctgtccgccgactacagcggcacttgacgggtccttcagcttctcaatagcagactgcatcgcacttgaaccgaatttattatggtaagaggttaagtacgccgccaattcctctcttgcgaaaaaccgggaagataagtcttccagtctttcgcgccacatgtccttatgatgaatactgtaatcaaaaaaagaagacatttcttctttgccatctatatagtgctgtacaaacacattctgatttttgatggaaagttcagttagctgcatcttctagaacttcctttctccaataaatagttagtgatccgaaatgagtatagcatgttaccgaaaaagctcaaaagactttgtttgtatttcgctccaatgctttgatgctgccatataaaaactctaggtggacggcatcaagaccttgaagacttgcttccttcaataagtatccgataatggcgtcagcttccgtctgccggcctccaatgacgtcaaccagcattgatgaacgattctctttcgtttgcccacaaacggcctgaacccgctcccaagccttttcttcattttcaagttttaaaatgcggcatgcctcctgaaataccagcttcataaaagccagataagctggcgttgtcagcagttctccatttttcacttgcaataacgcagttaaaggattaatacacgcatttacaatcagcttgcccgtcagcagacggtaccaatccgtctcataataaatcggaaaatccgaatggttatgctgaaacaagatgttcagccggtctggttcagcatcgtcgaacgcgctccattttatcgcacctaggcctgtatgatcaacagctgtatccgattttcttacagctccgtgctcaacgattccaacataaatggaatggccaacgtgccagtcttttaggtcgtggatatgccccatgccgttttgcaaaaataatatattcgtcttcccgattcgttcaagcgacgaaaaaacagattgaagctgatgctgcttcactgtcacgacaagcaggtcaaagtccgaattgatactcgtgtccgcactgcaatcagccctgaattcctccccgcctttataaagccggattccttcagactgaatggccgcagcctgttcttgccgcctcgtcacaacagtcacgtcgtgataaagtgacaaataataggcgcataaaagaccaacggagcctccgccgataattccaattttcatgatgtcacacccaatttagcatttacgtattatcatagcagaagtaagaagaaattacttctcaaagatcccatgtgcttaaaattaaagtttaaatatttggattttttaaataaagcgtttacaatatatgtagaaacaacaaagggggagatttgtttgacaaaggtagaacgtctgcttatcaactataaaacgctggaagaattcaagaaattcaaagaatacggcattcaggagctttcaatgcttgaagaacttcaggataatattattgaaaatgacagcacctcgcctttttacgggatttattttggcgataaacttgtagcacgaatgagtctgtatcaagttaacggcaaatcgaatccctattttgacaaccgccaggattatttggagctgtggaagcttgaggttcttccgggctaccagaacaggggatacgggagagccttggttgaatttgcaaaatcattcaaaatgccgatccggacaaatccgagaatgaaatcagcggaattttggaacaaaatgaactttaaaactgttaagtatgatatggcgcgggacaaaggggaaaacccgctcatctggcatcctgatatggatcgcgaaatgacaccgggagagtctgcatagaaatcaaaacaaccggcctattcttactatagggccggttcatttcaggcgtttctttacgtttcttgagccgcttttttcattcttccgtcttccttcgaaacaaccatttttctggcccgatccatgatatcgatcagtgccttgtaatcctcttctgtcatctctagctgattccgcaatgtctgattttcactccgcaaatcctcaagctctttttgcagcgattggatttgctccttcaatttttccctttcaagctgaaattcttgtgcagacggtgtttctttgaattgttcgagaaattgaatgacatcctgaatggacaaatctcgttttccttctgacgatgccgaggcagtctgcttcatggaattcggcatattgaccgaatgaacgccgatttgctttctcagttctttcctttgcttttttgcaagctctatacctgactggtattgttttctcacatacgagttccacctgaaaccacaggctgccgcggttctggtcagcgcccttccaacctcctcaaaggctgaaagctgtgttcctccctctcgaatatgacgaagcaccacttctgccagcagcaaatcctcatcctgagtccaagcatcttgtcttgtaatggtcaaattcaatctccctccatgtcagcttatttatctcatacatatgccggtaatagattagatagactatttgcactcacaaattttccgcaagctgacaggaagagaaaaagaaaaagcgcagggctttcaccctgcgcttttctcattagttactttttacatttatgtctttgccgttgtatgatccgcatgctttgcatacacggtgagacaacttcatctctccgcatgacggacattctgtcataccaggtacattaagtttgaaatgtgtacggcgcaatcttttcttcattttagaagttcttctaaaaggtacagccattattcccacctccttaaagagttaagattcatcatcttgttttaagagcttttcaagggctgcaagtctcggatcaacttgattcttcttgtcttcttccgaaatgacttgccaatcctttccttcttgaggagcagctcctttttcttgttcagattcacaaaagatttgcatagggatttctaaaagaatttcttctttcacgatcggagttatgtcgatagtatcgtcctcaacaatgtgaacgtcatcatcttctatatcatccgtgtgatgaaatataaacagttcttttgttgaaatttcaaatggatacggaacatcaacgagtgttcttgagcatggcaaaagcatttcgcctgaaattgtaaaatcaaacgaaacctgtttggatttgatatccgctctgcccttcacccgaacgggagaaatgcggcgaatgtcagaattcagctttgtcagctcatttaactcaactgtttcatcaaactcaaaactttgttttggcatttgatgcagctgataaatcgtccatttcatttgtatcacctcaggaaagcaacaaacatgattatagcttttaagattgtttttgtcaatattttttctttacagcataatgctgccattgaagtatcgttgacagcggaatatgctatgcatacacttaaaacaaaaataaggcgtaagagttttcatttgcaaatgtaccatacgtttttaaacatagcaagaaaggcggaaaaaatatgaaagctgtcggattggtggttgaatataatccctttcataacggtcacctttatcatgcccaaacagcaaagctgcaaaccggatgtgacacggctgtcgcggtcatgagcggacattttttacagcgcggggaacccgctgttgtatcaaaatgggcccgaacaaaaatggcgctgcaaagcggagttgatcttgtcattgagctgccttatctttatgccgtgcaaaaagcagacatttttgcacgcggcagtgtttccatcctgaacgaacttgaatgtgaggcgctgtttttcgggagtgaaaatggggatatcaagccttttttagaaacagcacagcttattgatgagcataaacatatattgaatgaccgaattaaagaagaacttaaaaagggggccagttacccagcagcggcggctatcgccttcagctccattttgcatactgaaagtgcacttgacttgtcaaaaccaaataacattttgggataccagtatgtgacctcgattctaaccgggggatatcctatgaaaccttatactacggcacgaatctcttcggactatcatgatgccgatctccctgaaggcgaaaaccatatagcaagtgccacaagcattagaaaagcgatgattggccagaatctcgaagcctgccttcgttttctccctgctgcatctgcacgtgaattagcagcttaccgcaaatctttcggattgtggcatacacctgaaagctacttttcttacttaaaatacagcctttcaactgtaacggcacgggaattacagcaagtatacgaggtggaggaaggtttagagcacagaattattcgttcgatcagaaaatccagctcctatcaggaatttatggaactgctgaaaacaaaacgctatacgtggacaaggctccagcggatgaatacacacattttaaccagaacaaaaaaacaggatatgcaaaagctgcttgacaacgataaggcgccgtatatcaggcttctcggcatgacgaaaaaaggacaggcttatttatccgaaaagaaaaaagcactgtctgttccgcttgtcagcaaactgtcctctttctcccatccagctctcgatctggacgtaaaagcaagcaggatttacagcctgccgatagaagagccgctgagaactgagtttgacctacaggaatacggacatgcaccgattcgatatgacgaagatgaacaacactttttaaatgtatagaaaaagcacctgagaatcaggtgcttttcgctttcagcttattcaaataatcaatcgcatcctgcatggtatcaacaggcacaatcttcatatttgaatcaatatcttttgctgtttttactgcgttcttataatcggaattgctggcgccgttttgatttggcgcgaagaaaatgtcttttccggctttgtctgcggcgacgactttttgatcaatgccgccgatcgggcctacttttccgtcaacatcaatcgtacctgttcccgcaatatcgtagccttttgtttcgtctggttttgtcagctgattatagatttcaagggacatcattaaccctgctgacgggccgccaatattttcgatttcaaaatcaatatcaggctctaccttcacgtttctgtctgtataaagcgaaactccgattcctgcccgatccggctcatcaggaaattgttttaacgtaagggtgacacgcttttctttttcttctctttcgatctttaacgtgactttatctcccgcttttttgctgctgatataatcaatcagcttttcagcagactgatagtttttgccgtctgcgctgatgattttatcaccgacttctattttcccttttgccggcatgttttctacaactgagcttgcgtatatgccgttaaaggaatagctgactttttttcctgccttttgataggcggctataaccgcattttcttgcgagcttttcatcatttggagctgtcttttcatatactccttatctgattcgccttcctccttaatgctctcatcaggaacaatttcataataagggtgcatctttgcccacacatatgtaaatggattagccggtcccactttaacagtcattaaggacagacttcctttttccgggtagcctccctccacttttatcaatgaagcaagctctgtcgcttctcccggttttgtaatatagtatggaagttttataaatgataaaacggcgatcagtatgaggatgacgagcatccagctaaaatgttttttacgtagcaaattatgagccctcccaattctctatttcttttcttatcttgctgatcattcggtttgtcgcctcttcgcctgccgatatcatttcttcaatattggcaaacgagcttgagctgtatgtttcaagggaagggcgaatcatgatatctgcggcaattgtttgatgccgcactaattcattttgcagtatatccatactttgcataatcacatcaaaaatatgcactgctgtttcagtttttcgaaccctggaaacatccgaagcgatgataatatcagctcccatgtctttcacaacagaaaccggaattcgatcgacgaccgcgccgtctacaagaaggcgtccgtccagccgctgcggaataaagatacccgggatgctgatgctggccctcactgcatctgacactgatccttttcggaacacaatcttttctcccgtctgtagatcacacgcaacaatgcccagcgggatttggagctcttcaatcggttttccgaatgtataagcatgcacaagctgtctgacgcggtcaccttttaaaaaaccgagtttcggcaccgtataatcagcataaagccttcgtttaaaggctttggctacttttttcatcgttgccacgtcatgtccggcggcgtaaaaactgcccaccaaagcgcccatgctgcttcctgcaatcatatccacttcaatttggtgcttatgtaaactggaaagcacaccgagatgagcaagccctctggcccctcccgatcctaacgctaacccgattttaggtttggccaaagcgttaacctcctgcctgaattccctgtataccgaattctatggtctaaactgaacccctatgctcgtatattagtacaaagaatcaagaggacaggtactgcttggccgttttacatcatacattattttatcatgatatacatgtcattgggcatttttagcatcggggaggtaagaatgaacttgtcgaagattaatacacttttgattgcctcgttttttctttttttaacagcgactgtcatctcacatccacaggcctcattcgaagcctctaaaaccgggctgtctatgtggtgggaggttgtgtttccgtcattgctgccattttttattctgtccgaactcttaatcggctttggcattgtgcggtttgtcggtgttttgcttgagccttttatgcggccgatctttcgcgtgccgggtgtcggcggcttcgttcttgctatgggaatggcatcaggaaacccagcgggcgcaaaactcactgcccgtctgcggcaggaaaatcagatttcaagagtagaggcagaacggctcgcgtcgtttaccaattcttcaaacccgctctttattttcggcgctgttgccgtcggtttctttcaaaacgcatcactaggcattttattagcttctgcacactatttggggaatcttgccgtcggtttaacaatgcgctcctatggccgcaaggaagagcagcatctcagaagaaagaaaacgatacctttcccttcagtcaaagatgctttacacgctcttcataccgccagacttgcagaaaaacggcccttaggtaaaattttaggcgacgccgtgacgtcttctgttcaaacgcttcttatggtaggcggctttattattttattttctgtcttcaatcggctgttgtcagtggtccagctgactgatgttttgtctgttttcacaaaaggagcactgactttgtttcagcttccgactcaattggacattccgcttttatcagggatgtttgaaattacattaggcagcaagcttgtcagcgagacagatgtttctcttctgcaaaaagccattatcgtcagctttattcttgggtttagcggcttttccgtacaagctcaggtggcaggtattttatcggaaaccgacattagatttaaaccattctttatcgcacgtttgctgcagggcgtttatgccgctgtcttcgtcatgcttttatggaaacctctttacacagcatggcatgatccgtatcagtatgtatttaaatctcttaacagcagtgacatgtcaactgcctttataaacggctggaatctgcttgtgcagatcggacctgctgtcacactatgcgcgctgtttacgtacattatcattttttcttacagactgacaaacggaacaaaaaaaggatgagtcaaaaccctcatccttgtctgaatttttgctgaagcgccaactctacttccggcggtacaaactctgataccgagccgttgtatcttgccacttcttttacgatgcttgaacttagaaacgaatattgattgtttgtcatcataaaaaacgtctcaatagattcatcaagcacccggtttactgatgtcccctgcatctcgtattcaaaatcagatacagctctcaagcctcttaaaatcgctttcgcattttttctttttgcataatcaattaacaggccttgcgatgtttcaactgttatgttcggaatgtcttttgtgacttctctcagaagctcacaccgttcttccacactgaacaaaggcttttttgaagaattattcagcacacatacatacacttgttcaaaaatatgcgccccgcgtttgatgatgtccagatgcccgtaggtcacaggatcaaaactgccgggacagacagctatactcgccacctcactaccccctctttttataaatcgctacacctgttaacccataggtttcttttcttgtcatcacaagatctcctacggtttcgggaagctcgacctctctgtcatgctcagcgacgataaagccgtcttcttccagcatttgatattcgtcaatcaaagttaaaagtgctttcagcttttgttccttatacggcggatcgagaaaaattccgcgaaagccggtttctcttttagcagcagcgtgcaaagcacgttccgcatcattgcggtatacctgtgcatgttttgtaagctccagcgttttcaaattagattttaccgtttgaatcgctttaaaatcacggtcaacgaatatacaatgctcaaacccgcgtgaaagcgcttcgattccaagacctccgctccctgcgaataagtcaagtcccctgcccccgtcaaaataagggccgatcatattgaaaatggattccttcactttgtcggttgtcggtcttgttgatgttccggctacagcctttagtgaacggcctttttttgatccagaaattactctcatgttccacaccactttttctaaaagctattttgtttctttattcggccggacgccgctatgtacatagaaaaaaatcaatcctatcttaacataaagcattcttccaaacaatgaacgctaatcttgataaacaggtgtataggcagcatgatccttgtccatactataagcaacagcatctagaggatgttgttgccaaccgcggagaagacttacgtttccccataagttcttcctccggtttctcctctccctttgccttctccttaacatattaaggaatagaaggaccccgcagatgcctgcggggatttttttatagctatatgccgattttataatcgtattcttttgccttatcaagctttgactcgaattccaattttaaaaacggtttataagaaggctccacttttttcacaaatgagtaagacgcaatcttgtccattgttttttcaatttggtccatatcacagtacagtacgacatattttaatcgttttgatacatagtgcacattcccgaacttcctcagcattttgctctgctttagggagtgcagatacacaaccatgccctggcgcctattctccaatacaatcacctgcctgttttctcttatatgtaaaagacgagacggccagtctcgtcaggacactttacatccgcagcttccgcctgaaccgcagccgcctccgcatgaagacaaaccgtcaaaataagggttcccagtcggaactttcacatgctccgaaacagctgtcccaatctcaacgctgacctcatcaagaatggactggagctcattttcagctctcttgaagtcagccaccttatcgttcaggtccagctcacgtttgatctccctcattttccgggatatttctctatagtcaggatgatatttgccaaaacgctgtacatcctcatactgctcttttattttgataaaagaacgaataatccgacctgcctcttcatcttcctggagacgcttgtaacaattgcggtagttctcagccgtctccgactgcagaatcatctcggcaagctgctgagcttcactttgaagccgcacggattccatcgtcgcatacataacatgcacctccagttgttagtttaccatgaaaccagccaattggaaaatgcttaaccgcagccgccaacaaaaccttatgaccgcatgaaaaaagacccttcttcggggccttttaatcttttgtccgcatcgcttgaaacatttgcatcatcatttgcgccatttgaatcccgttcgtaaactgattcacccgatgcggaatggttttttcataaaaattcatcatttcaagctgaaaggaggacagatcatccggttttcttgaaagcctgcggtaccatatcggctgttctctgatgaatcgtttccgttcttcgtttgctaaaatatattcctgaacctctttgcgcatatgagctccccttttttaatcctttcgaaaagaaaaaggatgctgtccagagcctggctgagaatgcttctgtccgcttccggaaaatgtattaagaaggctttgcaacgatgagatcgactggctcattttattgatttgttcgttcatttgattgacatccatctttttcaccgctgtcaccattttcgagacaaaatcatttttttgcggtgtttcaggcacagcttcagaagcttcttccggttcccgatatggatcccaaatcgggtcgctctccccgaagaggacccaattttcatatacgtcctgccagcttctttgttctttgcgcacttcttttatcagcttgggatgctttttgacgaattgtttaaagtcattgattgaatgattggcatgttgattcgccacaatcctcaccccctccgaaaatcgttacctactacaatgtatcgttttgtcgggcattgtgttcgcctatattcattcccaaatgaatttttagcgatatccctatacactggtgaaaaagcctgactgaagggatgggaaacggccttatctgtaagctatcagcacattcattcagaccagcttgtatggaaatagaaaaagccgggaaccattcgtccgcggctttcattaccatcgcttaataaagttttgggtgtaatatttccggtctactccgacaccaagatgcgtataatctgaattcagaagcgcttttcgatggccttcgctattcagccagccttctacagcagccggaccgtccacataattgtatgcgatattttctcccgcttgctgaaaatcaacatgcccttcttctaagcggtctttcagcgagccgtattttttagagacatgggagaaataattattttccttcatatcctcactatgcccaaatgccacttccgccgttggctgatcccactcaagcttcgcaagtccatgtttaacgcgtatgacattcgtcaaatcaaggatttgcttttcgctcgttgtttggatctttttccatttctcatctgaaacggctttcggtttaattaattccccgcggtacactacctcataaggtctttgctttacaaaggtctgcgcatcaaacgccctgatgctggatagcttcccctcaaatttgtccatatacagctggacatacatctttcctacctttacagtcggtcttgtattgatatcttcttcagaaaattcaaaccgataggaatttcctttatactctacattcacaaatggtgccacctgggtggtcttgaatacttcgccagttgattctccaattttgaaaggcttggcgttaatatcattacccgacgcgaataatgtgaccactttattgtttaataccccgatttggatatattgatccttaccttgattgtatacccaccaatcgtaatcataagccgaagggtcaatacgttcaggttccccaagctttttcgttacttcatcggcgtgcttgcccatgaaggacaataaccctgaagtcggcatatgtattcgtttgccgctttgcgcttcctcattcgacacctgaggctcgctgtcatttgatttcttttcaggaacagatccatattgaataaacagaacataggttccgcagataatcaaaaggataaccattgctctcaatatatttttcaatctatcacccccgtggcgattcacaatctcttgtttacatcccattacaatacagcctatttaacatgtcaaagatttatgtgttaatgaaaaaagccttcttctctattatccccttcggaaatatccgataaggcgctgccggcacgttcattcgtttgctcagataaagaaagatcaccaagcgtgacaattccagtcagttttttattttttgtaactggtatccttctgagctgatgcgatgccatcaaatgaagaacctcatcgactgaagcatcttcctccacactgacaggtttttcagtcatcgcgtcagtgattttttgcgagttcggttttttgatggcgattcctcttaatacgagatcgcggtcggttacgatgccgaccaatgtttccccgtcctcatcaactaccggtatcgctcctacatttgcgtccttcatctttactgcagcttcatatacattatctaataccgtgcaatattgcaagtcggctgtcatcagatcttttatttttgtcatccgtttaacctcctttagtctagtgctattgtcgtcaaaatttaatttttgcatactttcaaaagaagaagattcattgaaagtttaacgctttcatactatgattgtcaggaaaggtaatttttataaggaggggtcagtgttgaagtttactgaaagcggacttgaaggggttaaggctgagctcagctggctagacgacttaatggaaagcaaaggtcttatcagagcgggtcaatgggattacgagagagtcacctatgacaagaagttttcgacgattgagggtacgttttacctgcggatacaaggtattgcggcagaaggcgatgtcggaagcgggcgcgccgtgattcaattaatgtcccctctcctaggaaagcattactaccctcatggagtagaatatggagaaacggaagagtttcccgtacaggttgtgacaaaaagcaaggcactgattcaggacatagccaacatgttaaaaacagttcaaatgtaacgaaaaggtacagcatatttcgctgtaccttttatgatatcgtctgctgaatatacggcggctcctcctgcccgtccttttccctttctttcttcacccattggaaaaaaataacggccaaaaaagtaccgtacacaatttcctgaatgattttcatcatgactgctccgagctgctgatcctctaacaaaggcagtgtattcaacatctctggccctgttaatgggacctgccccatcatatccgctggcacgcaaagcctcattgcctcagcccataaagccggatctgtataggtggcgtataacggtgcaccgctgaacatgatcaaggcgcaagcaggtgtgagcagcataccgtccgccataatataacccagcttcatcaagccgctgagctgccgtagacgctcaaccttatgaacaagcggccaccacatgaagaacgcaagcacaaagataagccaagtgattaatgtatggtaaaacggatctgttttgacagtatcaaatataagcggtacatgatataaagaaaaaatgccgttaaacaaaagcaaagcaattaaaggcgtcgtaaaaaaggaaaaaaccggtttgattgaaggcctgaaaatgattttttcccagagccatgcaggaatccccgcgattaacagcggcgggacaaccaaatacaggacggccatctgcaccatatgcgcactgaacataatatgtccgagcagatcaaccgggcttccctcggctgcatataaaaacagcatcgccgacagaaagcacaccatctctttaccagttattcgattcggctttgaagacattcgcctgtaaaaatagagataaagcgccgtaatgcctaacaggatacaaaaaagataagggctccacatcgcgcgaaacccaaatatctccaactgattcatttcttcacctccggcggctgttcaaattaccaccatataattgtcacaaacgcaagcacagtgataaacgcgacaaacacccctgaatacaaaaacagtgccggcgcctcatgccctttctgattcatatgcatgaaataatacagctgaaaaatgacttgaattgcagctagcaaaataatgaaaggaatcgtaaaccagctgccgacaccgtccgtggccacagtcagaaatgcaacaatcgtaagaccgatcattaaaccaaaagacaggacttgatatttcatctcccgggcatgcttttttttcttaaattcaaggtcgctattgatatgccctctgctttttttatcgaccatgtttatcccaccatccccattaaatatacaacggtaaagatgaagacccacacgacatcaataaagtgccaataaaggctggcaacgtaaaacttaggcgccgtatacagattcagccctctcttggcattgcggatcataagcgtgctgatccacataagcccaaatgccacgtgggcgccgtgtgtaccgacaagcgtgtaaaacgcagaaccaagggcagagcttgtgatggtaaagccaaattcatgggtgtaatgcttgaactcatagatttccagtcctaaaaagcccgcccccaataaaatcgtaattcccagccaaagctgcatcttgccgaaggaaaagttcttcatgtggtacatcgcgtacacactcgttaaactgctcgttaatagaagcattgtggcaatgaatacaagtgtcacatcgaacatttccgtcgtaggcggatcaccggcatttgaattccgaagcgcaagaaacgtggcgaagagagacgcaaacagaacagtctctccgccaagaaaaagccaaaagcctaaaaatttatttttcccttccagggttactttttcaggagaagctggaaaggtttctgcggtgaatttttcttgaacttgcattatgccttcacccctttatcatcgttcggcagttcctctttatgaatatgatagccgtgatcatcaattactgaacgaagcagcatcgtaataaatgtgatgccgagcccgataaagatcaccggcaggccccaagcgtaatcacttctgtacagcagcccgaacgctgcgacaaaaaggccgaaggaaatgatgagcggcaggattgagccgtttggcatatgaatatcatcaaccggttccgccggcgtcattgatttgtgccctgcctgcttctcgatccaaagcggatcaagtcctctgacaaaaggaagctgtttaaagttatactccggcggcggtgaagaaacggtccattccagcgtacgtccgtcatgccatggatcagcacctacatattcaccttttaccgatgtccatatgacattgaccagcagaagaataacagctgccgccataaaaaacgccccgattgtactgatcaagttgccggtttccagaccctgtcctggcaaaaacgtataaacccggcgcggcatccccattaagccgacaaaatgctgaatgaaaaacgtgaggtgaaagccgataaaaaacaatacaaatgaaattttccccatcgtttcatgcagaattttaccgaacattttcggccaccagaaatgaacaccggctaaaaggccgaatacaacgccgccaataatgacgtagtggaagtgcgcaaccacaaaatacgtatcatgaaactgataatcagccgcagcagctgccagcatgactcccgtcacaccgccgagcacaaaggatggaataaatgagacagcatacagcatagcggttgtatacttcacatttcctccccaaatcgtcaacagccagttaaaaatcttaatcccggtcggaatcgcgatagccattgttgcaaccgcaaaaatcgcatttgcaatcgggccgagaccagtcgtgaacatgtggtgcacccaaaccataaagcccagaaagccaatgagcacgattgcaaaaaccattgaagaatagccaaacaaacgctttctggcgaacacagggatgacctcagaaaaaataccgaatgcaggcaaaattaggatataaacctccgggtggccgaagatccaaaataaatgttcccaaatgaccgtatttccgccaagctccggattaaagaaattggttccgaacagccgatccagcatcatgagagccaatccaaccgtaagcggcggaaacgcgaacaaaatcaatgccgaggccacaaatgtcgtccatgtaaacaaaggcagcctcatatacgtcatgcccggagccctcatgttgataatcgtggccaaaaagttaatcccggctatcagcgtcccgagccccgatatttggagtccgaggacgaaaaagtctatgccgtgccctttagaatgaagcgaaagtgaggcatatgatgtccagcccgcatctggcgctccgcccaaaaaccagcttagatttaagaaaatgcccccgaaaaagaagagccaaaaaccaagcgcgtttaaaaatggaaacgaaacgtcccgagccccgatctgcaaaggcacaaccgcattcatcaaggcaaataagagcggcatcgcagccagaaagatcatcgtcgttccgtgcatagtcattacttcattgtacgcttgagcactgagaaacgcattttccggctttgcaagctgaattctgataaacatcgcttcaattcccccgacaagaaagaagaatccccctgccactaaataaagaattgcgatttttttatggtccaccgtcgtcaaataatcccaaagcatagatccgcgcgtccgcttttctgtaagcgcattcaacatatgtgacctcccccaatatctccctttcttccctacttgctttccgcttttaagccttttaagtattcataaagcgcatttgtttcgctgtctgagagctttggatatgtgcctgtcattttgttccccggctttatgctgtcagggtccttcagccaagccttcacattttctttgttggcctctttcacccctgccacttttgtcctttcaccgaaggtcgccaagttaggtgccgttctagcggcttctgcacgcttatcattcggctctaccgcatggcagctcaggcagtttttctctttaaacagttcttcaccctgcttagccaaatcgctctctgctgtagacttatagttcttcatttcttttgtccagccctgaaattcttttgcagacatcgtcttcaccttaaaatccatcagcgcatgtgaagggccgcaaagctctgcacacttcccaaaaaacatatctcctgcctctttgcttcgttttgaatcaaatgtcaggaagaacttattttcattatccgtattcgtatcaagttttcctccaactgaaggaatccagaaggaatgttttacatcagaggcttttaaattaaaatatacacgctgatctgtcggtacaatcagctcctggcttgtgataatgccgtaatcagggtactcaaactcccaccagtataaatttgccctaacattgactacaagagcatcctcagctttgcggccttttttatccattggtgatgtgtccgctagctccagcgtatataatacaacaggaatcacaagaataatgagcagcaaaatcgggatcacggtccatgtgatttctaaaaatttattcccctctacctgtttcggtatcgtgttctcaccgacccgtgatcttctgaatctcacaatcacataaaagaagataacagatactactgcaacaacaaccaccataatcaatgtgctgagcactgtcaggtcatactgtttatcagccacctcgccagcaggcttgagcgtggataaaaaaggttttccacatccgcttaatagaagcggcactaaggctaataataaaataagacgccaatgctttaccatttcacccaaccccttttctggtcaatacaaaggcggaaagcggatcgaaatctatcgccatccaacctatcaccaataaagcacttacatttcctcttctcttaaattatgagtttttttactcaaaatgccatctatgtataaaagtaaagccgcctgattaaacaagaggtcaaggcggcatttactagttgtcatcgtttattttgaagcgataaaacaagcatcatatctattttttagaaaagcgtcaagacaaccatggcaacgaaatagattgtcatgtagttaagcgagtaaacgaacatctgcgttgcccacttcatgatattcttggagcggaatcccattaagccaagaatcagccagccgatatttaacagcaagccgagaatgacaatcggaagacccaggctaccaaggaaaaacggaagcggcatcaggcacgcaacccacacaataatttgtctttttgtcacttcaaatccgtatacgacaggaagcatcggaatatttgcagctctgtaatcctcagttttcttaatagccaatgctaagaagtgaggaatctgccaaataaataaaatcatgaataacacccatgctacgacaccgatattcccttccactgccgtccatccaataagcggcggcactgcaccggaaacgcttcctactactgtgttaatcgtatagcggcgtttcgtccacattgtgtacaatacaacatacgtaaagactccgataaaaccgataacagcagccatgacagttgtcatcagcagcatgatcaatcctaaagcaaccagcaaaattccagaccataacgcctgactcggctgaattttacccgtaaccgtcggtcttactttcgtacgctccataagatggtcaatgtcccggtcataccagttattgatcgcgcaggagcccgcaataatcagtgaagacccgattaacgtaagaagaacggtgtttatattgcctaaaaaacttaaaccggatatatgcagtgcaagccacattccagtgaaagtcgtgatgaggttagaattgacgatccctattttaataagggacagaaaatctttccatgccgttgtttcttcaatttgtccgtctatagctgtatcatttaagattctggagttagccataacgtaaacctcccttacaaacctaacgcaggagaataaaataacctgcaactctatcatacaagataacatcttgtaaaaaaacatcctattaaatattaaacgacaaacaggaatttatttgtgaactttttatgaattttaccaaagatgaaggcaatctccaaatcggcattgcgtttaccttatttctatcagacccggcatgaataatcaagtgtacattttccagaagccgtcattctattatatttttgtgaacaaaaggctctgggaattgccacaaaacacatattcgcttacacttggaacgtatataaaattgcagcagtatgttaagaaggtgaatattgtatgaataaagcattaaaagctctcggtgttctgacgacatttgtcatgctaattgttttaatcgggggtgccctcgttacaaaaacaggttccggccaaggatgcggcagacagtggccgctgtgtcacggccgttttttccctgaactgaatccggcttcaattattgaatggagccaccgattcgcaagcggaatctctattatccttgtgctaagccttgcgttttggtcatggagaaaaatcacgccgatttttcgtgaaacaacgtttctcgcgatcatgtcaattatctttttatttcttcaggcattgcttggcgcattggctgtcgtattcggttcgaacgcgctgattatggcgcttcacttcggcatctcattaatttcttttgcttcagtgcttattttaacattgctcatatttgaagctgataaatcagtcagaacactggttaagccgcttcaaatcggcaaaaagatgcaatttcacatgataggaattttaatatattcctatatcgttgtgtatacaggcgcatatgtaagacacactgaatcaagtctggcatgtcctaatgtgccgctgtgcagcccgctgaacaatggacttccgacccaattccatgaatgggtgcaaatgggccacagagcagcagccttacttttatttgtatggattattgttgccgctgttcatgctattacttcctataaagatcaaaaacagatcttttggggatggatctcatgtcttattttcattacattacaggcactgtccggtattatgatcgtatactctgaactggctctgggctttgcacttgcccactcgttctttattgcctgtctgtttggcgttctatgctacttcttattattgattgctcgtttccgttatgaatccaggcaatcataaggactcaagaccaaagccttaggcggctttggtcttttttatgtcttgttttttggcgctttatgcgtttcaatcgccagccttcgccgaacttgatgatcagtgagcggctcacttcggtctgtcccctttctcatcgtgattatagaaatttcatatggatctatagctcgcgaacataagtattaaagccttttaaatcagatagtgcttaaagaaatatgcacggcatactacaaagcatctaaaatattggctgtataagcctctttttattttgggcttgtgacagtactctataatctctgaagtccccttatatctcttctaaccatctgtttcactccacattttctatataaaaaacaagagtgtatatcattgatatacactctttgttttttatgctttttcaatttcaaggagcagatctcccgtttggatcggctcaccatttttcacatgaacctgcttgattgttcctgagaaaggcgcctgaaccgttgtttccattttcatcgcttcattaatcatcaaatgatcacctttattgacttttgtgcctgcttcagccaataccttaataactgttccaggcatggaagctgcgatgtggcttggatttgtccggtctgctttcagcctttcctgaacggaagacttaatgctttcatctttaatgactacttcacgcggctgcccgttgagttcgaaataaacgacgcgggtggcatcaggctgaggctcaccgattgaaatcagcttaacgatcagcgttttgccgcgctcaatttcaacttctatctcttcacctaatgtcataccgtagaagaatgtcggtgtatctaataccgagatgtctccatagctttctgtcgttttcacataatcagtgaagactttaggataaagggcatatgccacagcatcctgatctgaaatttccaagttatgctgctctttaaattcctgtttgatcgcttcaaatgacaccggctcaagcagttcgcccggtctgactgtaatcggctcctgcccttttaagatcagcttttgcagtttttctgggaatccgccatgaggctggccgatatttcctttaaaaagctccacgacagaatcagggaaatctaaagattcacctttttcgtaaacgtctttttcagtcagattgttttgcaccatgtagagtgccatatctccgactacttttgaggaaggcgttaccttgacgatgtcaccgaacatatcgttcacgcgtctgtacatttccttgacttcgttccagcggtcgccaaggcctactcccttggcttgctgctgcaggttgctgtattggccccctggcatttcgtgttcataaatttcagtatgcggagacttcattccgctttcaaattcactataatatttacgcaccgactcccaatattgggacagcaattcaacgccttggacattcatttccggacggcggtcgttgccttccatcgcatgataaaatccgctcgcgctaggctgtgacgttaatcccgccattgagctgaccgccacgtctatgatatcaacgccggcttcaacagctttcgcatacatataaataccgtttccgctcgtatcatgcgtatgaaggtgaaccggaatgtcgatcgtttctttcaacgcagaaacgagctcatatgcagcctgcggttttaacagccctgccatatctttaatcccgagaatatgggctccggccgcctcaagctccttcgccatcgatgtataatatgcaaggtcgtacttcgtccggttcttgtcaaggatatctcccgtataacaaatcgcagcttctgccactttgccggtatccctaacagcatcaatggctaacgtcatcccttttacccagtttaagctgtcgaaaatacgaaacacatcaataccggattgagctgattgcttcacaaattctttaatcacattgtccggataattcgtatagccgaccgcatttgatgagcgaagcaacatctggaataaggtattcggcacttctttgcgaagatcttccaaacgtttccacggatcttctttcaggaatcggtaggctacatcgaaggtcgcgcctccccacatttccatactgaatagttcaggccataacgcagccgtcggatttgcgatttttttcaaatcatgcgatctgattctagttgccaataacgattggtgggcatccctgaatgtcgtatcagttaaaaggacagatttctgctccttaacccaatttgcaagcccttctgcacctttttcatcgagaatttgctttgttcctctggcaggctgctgatcaacgtctacctttacgcctaacggtttgtcaaacgccggtttttcttttttcccgattccagggaagccgttcactgtcacattgccgatgtaagtgagcattttcgttccgcggtctttttgtttagggaaattaaataattcaggcgttgtatcaatgaaagatgtatcatattgccctgtcaggaacttctcatgctttgcaacgttctcaaggaacggaatgttcgtttttatgcctctgattctaaactcctgaaggtttcgcaccattttggcagctgcctgttcaaacgttaaagcccaagttgaaagcttaacgagaagtgaatcatagtatggtgtgatcacggcgccctggaagctgtttccggtatcaagacggacaccaaaaccgccgcctgagcggtaagccatgatttttcctgtatcaggcatgaaatcattttgcggatcctcagtcgtaacccgtgactgaatggcatagccgattgtaaaaatgtccttttgctcaggaatatttacttttttgctgtgaaggctgtgcccttgggcaacaaggatctgagtttgaacaatatcgacaccagtaatcatttctgttatcgtgtgttcaacttgtacgcgaggatttacttcaataaagtagaactcgttgtttgcaacaaggaattcgaccgtccccgcatttatatagtttacatttttggcaagcgcaactgcagcctcacaaatttggtcccttaattcaggtgacagcgagacactcggcgccacttcaatgactttttgatggcgtctttgaacggagcaatccctctcaaaaagatggacgacattgccctgcttgtctccaatgacctgaacctcaatatgtttcggattctcaattaatttttctacataaacttcatcattgccaaaggctgctttcgcctctgatttagcacgctcatatgcttctttaacttcactttcagatctgacaatccgcataccgcggccgccgccgccaagcgaggctttaatgatgatcggataaccgttagcttgtccaaattgttcgacggcttcaagcgtttcggcaggaccgtcgcttcccggaatcacggggattcccgctttttctgcctgctcacgcgcttttaccttgtcaccaaacatatcgagatgctcggattttggccctatgaatacgatgccttcttcttcacatcgtctcgcaaaatgaatattttcagataagaaaccgtatcccggatgaattgcatcgactttgtttcttttcgcaatatcaatgataccttcaatatccaggtaagcatcaatcggttttttcccttcaccgaccaagtatgcttcatccgctttgtaccgatggtaggaaccggaatcttcttttgaatagaccgcaactgtacgaatattcaactcggtacacgcccggaatattcggattgcaatttctcccctgtttgctactaatactttttgtatcgattgctgagacaaacttttctcccccttacccgaatggaatataatctatcatagcggaatatccttcccctgtacacacttgttttttacagataaacagtttttttgagctgtttctttttcattcccttcggcgccaagggctctttctttttcttattctctgaatatttcacaaacatgctgatattcgctaatatccccatactccccagcagcagcaccaaagaagagcccccgtaactgataaatggcagcgtaacccctgtaatcggaattaatccgctgacaccgccaaggttaataaacgactggatggcaatcatgcttgaaatgccgatcgccagaagacttccaaacgggtcctcgcattttctggcaatataaaaaccttttatgacgacaaaacccaataagaaaatcacaaacaataccccaaaaatgccgagctcttcagcaatgacagccataataaagtcagtgtgtgattcaggcagatatccgtatttttggatactttcaccgagccccaggccgaaaatgccgcctgagctgatcgcataataagaattgatcacttgcaaacctgatgaatttgcatacttaaatgggtcttcaagactctcaaaacgcgctaaacggccttcagttaaaattttgtcctgattcaaatagataatagggctgactaaaatgaaaacaattccgcccagtatcacaagcctcaccagcgtctttccgctgaagccggagcacaagatcatgcacgtcgcaattaaccctataatcatggctgtaccgaaatctggctgcatggcaattaacccacaaattataagcgtcatgactaccggaggggctactcccgttaacagatggtcgatataactttgtttttttgcatatacggctgcaaggtataaaatcacgaccagtttcacaaactcccccggctgaatactcattccgccgattttaaaccagctctgcgcgtttccggcaacatgcccgaaaacaaacagtgagataagcgcaagaacagatacaagcagtatccccttctgaaacttttgatgggccagtgctttataaggaaacaacgccatgagaataaatagagcgccacccgcaattaaagcaaacagctgccgcatgaagaaaaaattactgcttactccataccgggagacagccgtaatcatgcttgagctgtataccatcactaaaccgaatccgcataataaaacgattgcgaatatcagtgagtaatcataagattttagcattttttttaacataacatcctcttccctgcttctaacttccattatctatggtttttatgtatttatcttttttattttactacaatttatcaaacgagacgaagaatctctatacgattcggaaggaatgtgtaaaaaaagaccgtcttttatgagatgagagaaaaatagcggttataaaaaaacccaaactgttaataagtttgagttttatcatttatttagctgtaaacgcgtcatgcaaagcagacaattcgcgctccaatgtgtataaaaggtctttaccgtctttttcatcaaccaatcccaggcggacagcaaaatcgatttccctcgaaagcccgaacatttgagtatctaaaacctcttcatatagaggacattgaggcatcgttaagttatccatttgtactcggatcagcttcaaaatcttctcagcgtccacttttaagagttcaaaagctttttgccgatggtcaactatcatctctgaagccaaaagtatccctccgttccccaggcgagtacctaattcttctatttatcataaagggtatcaacagaaaatgcaagaggatttaagcatatgacataaattaaaaaatactcagcctgtacatctcagacattatttccaaaagctttacacctgcaatgctgttccctttttcgtctaatgcggggccgaatatgccgatcccgaaatcgtaaggcgaaatgcccattatcccgccggatacgccgcttttcgcaggaattccgaccttaattgcgaattccccgcttgcattgtacattccgcacgtcaccataaacgttttgcaaattctagcgacatcttttgagatgacctgctccccagtctctggatgtctgccgttcaatgcgaatacagatccgattttcgctaaatccaagctgttcatctcaatcgcgcattgcttcgtatataaatccattactgcctctacatcatcttcaaaaatgccgtactgcttcatataataacacatcgcccgattaatcattgaagtgctgtattcagattcagccacttcccggcagtatgtaatctcttggttgtttgtcagccttctgataaaagaaagcaaataatcaagtctctcttttaccgttcttccccttatcagacttgtcactaccaatgccccggcattaatcatagggtttaacggcttgctcggattcactgtttcgagcttgataattgaattaaacggatcaccggtcggctcctgtccaacataactgaagaccttatctttgccgtattccattaacaccaaagcaagggaaaggactttcgatatactttgaagcgtaaatgttttttctacgtcacctgctgacagacaaacattattggaataataaatcgccactgacaggtcgtgtttatcagcttttgccaaggcgggaatatagctggctacctcccccttgtccgttacttttttcgcctttttcactaaggcttcaagctcatcattatgctggcataccatgcaaacaccctcgttccctcagcatttcaatacacataatttgtacacaaagtgacaattcatgcgaaaacttttataattttgagagaagggggtcatatcatgagcgttatccaagtaaaaggcaatgttacatatccaattaccattgatccaagcgtatggatttttgatgatcgcaaattttcgtttgaccgcaaaggggacagtcaagacacatatttacaatcagccggggatgaatccgaccttgatccggaacgcgtcatcagagaggggcgaatcgcgccgcctacattaaagacggaaaagcaatatgagaagcaaaaactgatgaacggcagtttcgcaatgagacttgggactgtcctgaaaaatgctgagccgaacagctctgcgacacaatgtgtatttgtcacaagttcgggaaaggccgccgtttctctggaaaccgctctgaacagtattgtccatttcagtgaggcaggcaagccgattcaagaaggcggccccgtgcatatttactttgaagacccggttcatcacaaacagccgattaccgatgtaaaagagatcgaaatcatttaagtgttacagcaaatcagctgcaagctgggcgagacctgatctctcaccttttaacagcttcacgctgcctgagatgggttgtcctttaaaccgctcaaccacataggccaaaccattgttcagactgtctaaatatgggtgatcaatttgttcagggtcgcccattaagacaattttactgccctcaccgactctcgtcagcaacgttttcacctcatgcctggtcaaattttgcgcttcatcaatgataataaattgatctggaatgcttctccctctgatataagtcagcgcctctacctgaattgagccaattcccgccaaaatagcatcaagctcccctggttttttcgcattaaacagaaactctaagttgtcaaaaatcggctgcatccaaggctttagcttttcctctttttcgcctggcaaatacccgatgtccttgccaacaggaacaatcggccttgcgacgaccagctttttatatattcccaagtcttctgtctgtaatagccctgccgccaaagctaagagcgttttgccggttcccgctttgccgatcagggtgacaagcggaatatcttcccgcagcaaaagctctaatgccattgtctgctgtacatttttcggcctgattccccatatatgttcatcatcaaatacgagtctttttaataccgttccggttttgtctgcaattccgactgccgaggaggaccctcctagctcatccttcattaaagcaaactgattcggataaaacgcatgctgtttcacatcgtttactgaaatttgatttttcccgtaaaaagagctgaacagctgctggctgatatataaatctttatagccgctgtacatttcatcattgtccacaacccggtcattcaagaaatcttcagcaagcagtccgattgcgtcggctttaaccctgaccagtacatccttactgacaaggataaccggcctgccattttccttggtttcttcctcgaggcttaagtttttcgcaacggctaatatgcgattatcgttcgtcttttcaataaagatctcttgcagctggtgaaacgaacgatgattcagttcaattctcagtgtgccgccggtgtcaagcggtacatgctcatgcagcctgcccttttgtcttagcgcatcgattagcttagatacgtgccttgcattcctcccaacttcgtccatataccgtttttttgaatcaacctcttctaaaacgacagcagggatgacaacctcattttcttcaaaagaaaatatcgcgttaggatcctgtaataacacattcgtatctaacacataaattttactcaagtctcagcctcctgatataagggtcaaagttcttcctgcttctcttttgatgaaaaaggtgaatgcctgctaaaatatatgtttttgtgcataaagatagaaggttaattcaacaataaaattaatgaaagcattttaaggagggaacccgcaagtgcgaattcttttcattatcatacagctgacacttatcctgtccgcttgtgcctatcaacaaggaaaacagggccagaatgttgaaaaagaatcaacaagacagcaggagactaaaccgattcacgtaaaggacacaactcaagaaacaaaagacaatggaacaagaacggatattgccaagcatcttgtcagcgttgctgaaaaaaaccccgacgtcaaggatgcaacagccgttgtgctgggaggctatgctgttgttgggattgatgtcgatgatactttggacagaagcaaagtggaaaccattaaatattctgtagctcaggcgctaaagaatgatcgatatggcgccaacgcagtagtcattgctgatcccgatacggtcagccgccttcgcgaaatgagcagagaaatcagcgagggccatccggtaacaggtatactggatgaattagctgcaattgtcggccgagtgcttcccgaagtgcctaacgatgtgattgacaatgaagatgaaccgcaaacaaagcagcaaaatgaccaattaaatagaaaacagcaacaggaaatggagaaggaacaaaacgatcaatctgatcatcatatgaaaaagaacaacaatgactaagctatagccttgcgctttagctttttcttattttggacagcttctgatccgtggtataatacatgttagtgaaagaggtgatatgatgagggtcaaatgttctatttgcgataaaattgaaacaattgatgatgataccctgatcgcgaaacggcttcgaaaccgcccgatccatacatatatgtgccaggaatgccacgatcggattgccaaaaaaacagaggaacggctgaaaacgggaaaatttacttttcacccgggacagcagaaaaaagaaaaagtcaaaaaataaagcggccgcttaaccatacagaacacaaaaaagactcagctttcagctgagtcttttatgattttgcagactgtccttttttcgactgatacagccggattttgtaaatgattaaaatcagcgcagcgacgaccaatccttctgccacgggcaaaaacacccctaaaaaagtcaaaacagtgcagcccaaagccaaaaatacatacaccactgcagattttaatacaggaagccgtttagcaaatccaagcttaaatacaataacggccaacacaaaaatcgtgccgtacagcagccacatgcctgccgcaggctgccggtctacttgatatagagcggcgaagaacgacaggcgttcgcttacgtcattcaaaaagattccctcccctgtaaacgtacgggttctatcttttcaaattctgcacgagattaagacaatcctgctgtttttttctttttagctgctttttcacgttcgttcttattgaggatcttctttcttaaacggatggattcaggtgttacttcacaatattcatcttcgtttaagtactctagagactcctcaagagacatgatgcgcgcttttttaattgtagttgtctgatcctttgtcgcagaacggacgtttgtttgctgtttcattttgctgacgttaacaacaaggtcgttgtcacggttatgctctccaacgatcattccttcgtatacttcagtacccggctcaacgaagatgacaccgcggtcttcaattccttgaataccgtatgatgttgcttttccgttttccattgacacaagtacaccttgacggcgtccgccgacttggcctgcctgcatcggctggtagctgtcaaacgtatggttcaaaataccgaatccgcgtgttaatgataggaattctgtagagtaaccgatcaatccgcgggaaggaactgtaaagatgagacggacttggccgtttccgttgttgatcatatcaaccatttcgcctttgcgggcacccattgattccattacagagccagtatgctcttcaggaacatcaatttgcacacgttcaacaggctcacagcgtacgccgtcgatttctttgataataacttcaggttttgacacttgaagctcatagccctcacgacgcatattttcaattaaaattgacaagtgcagctcaccgcgtcctgaaacaacccaagcatcaggagaagctgttggctcaacacgcaagctcacatccgtctgaagctgtgattgaagacgctcttcgattttgcgggccgttacatatttgccttcacggcctgcaaacggactgttattcacgacaaatgtcatttgaagtgtcggctcatcaatgcgaaggaccggaagcggatcttgatggtctacaggacataccgtttcaccaacgttgatatcttccatcccggaaaccgcaacgaggtctcccgcttttgcttcttcaatttccacacgctttaagccttggaaaccaaaaatctttgtaacacggaatgactttgccgttccgtcaagcttcataagagaaacctgctgtccgactttcattgtgccgcggaatacgcgtccgattccgatacggcctacatagtcgttgtagtcaagaagggcaacttggaattgaagcggctcctctgcattatcaacaggtgccggaacatgcttaataatggtttcatataaagcttccatgttttcatcctgttgtttcggatcaagactcgctgttccattaatcgcggaagcatataccactgggaactcgagctgctcttcattggcatcaagctcaatgaacagatccagaacttcatcgataacttcctctggacgagcaaagtcacggtcaattttgtttacaacaacaacagggttcaggttttgctcaagagcttttttcagaacaaaacgagtttgaggcatacagccttcatatgcgtcaacgacaagcactacgccgtcaaccattttcataatccgttctacttctcccccaaagtctgcatgtccaggggtgtccaaaatattgatacgtgtatctttatagttaatcgcagtatttttcgccaatattgtaatgccgcgttcgcgttcaagatcattagagtccattgcgcgttcagcaacctgttcgttggcacggaacgtaccagcctgatgtaaaagctgatcgactagagtcgttttcccatggtcaacgtgggcaataatcgcgatgttgcgaagatcatttcgaagtttcactttttcatctcctaaaaaaattagataactttcatattatatcacacatcctctttaaaagcgtcacgtttttctgtaaacttaatataagacgtaaaaggggatggaatttatgaaaaaaatgaattggcttttactattatttgcatttgcagcggttttcagcattatgctgatcggcgtctttatcgctgaaaaaagccctgcaggcattatcgccagcattgtacttgtttgcgctgtcatgggcggcggatttacattaaaaaagaaaatgcgcgaacaaggcttgcttgattaaaagcattgccccgccggcgacattgtaatcaaaaaacaccgcaaagaaagcggtgtttttcatttctttaagccttatctcccctgtttcttagtcaggaagatgcaaaacagccttcatacatagacaatcgttctaacgatcacacgtgcagccttcaaaaagtagttcggcaacgatacacataaaataccatagcgcctattcctccaccggaaactactccctataatggaatttgtagcacaattcataaaagggagagaagaaacatgaagaaaacatttgtaaaaaaagctatgttaacgactgccgcaatgacctcagctgctctattaacgttcggtcctgatgcagccagcgcaaaaacaccggttgataacactgctgttcaactccagcatcaggcgagcactaacgaagatctcaatacattcattgatatattaaatcaatgtatatacgaacaagacggtgtatattattttgacagcgaaaaagctgtcgagttaggaatgacaaaagaagaggctcaggtaattgctacactctgggaatcgacatcagaatttttcagcattgtttcacaatgtgtgtatctcgaggatggaaattacaaatttgatacagaaaaagcagttgaacttggcttcacagaaaaagaagcacttgcacttgaacaatttttctccgctgtttctctcaagattcacattcttcaagcagccattgtgctacaagatgatgtgtacagctatgataaagacgcagcgctacaagcaggtgcaacgccactgcaagctgacgtttatgaaaaactcttcagtgccctgtcacaagaacagcttgccgctatttacgatatgattcatccccaggcttaatgtaaaaaagcgcttgccggaatcggacaagcgctttttttatatcagcagtttgatgatcagcatcatggcaaccgccgctccaaaccagcaggcagctttcatgatcagtaatccatagtacctctgtttaaaacgcagttcttcttccggcagataagcctcctcaacggcctgttcgctttccaattcaaatggctcagccatcgtgtcatacatgtctctgcagctgctgcacatttttaaatgctcttctataacgtgttccgtttctcttttacaatcaccttcaagatacagaggaagcaggtctcttactagaaagcaggtcatatccgctcctcctctctacttttcgtcatgtttttctttagctctaatctagcccggtgcaatgtggtattcaccttagaaagactccatcctaatatctcagcgatttcttcataagaaagctcttggaattctcttaaaatcaaaacggattgatgctgatcttttaacttcaggagctcctgccgcagtgtttcgcttttcaccgtccgtgacagatactgttcaggctggtcataagttgtttgcgttaacccttcatttttgctgatttcagtaaattggtatttgacatcccttcggtaccaattgataaaggtatgatgcgcaatggtgtagagccatgttctgatggaagaatgccccctaaacgaagccagaccgttaagagcttttacaaacgtgtcctgcgctaagtccttggctgtttcaagatgatgagtccttctgaataaataatttaaaatttcttgataatactgccgatacaagtcctcaatggaatccctatgcttcattaaaaataaaaccacaccgtcatccaaatggccaataaaatgaaacagatatacatggaagacaggtatactttcatatatctgatttggctttcttcttcagcaccgggacttctctttaaacaagttttactctttaagtcttccgcattcttttgaaatagggattcatgctgtttcatccattccattgattcatcctctagctctccttctttatacaggtcgtataagtctacaaaaacagactctttttctttatgattcataaagacttttcacctcttgtgtttctccatccactacataggcatcatggcgatttgaaccaaacggctgaataatgatcagccatgcataatgccgttcatcccctctttgaacgataatcggacgcatacgctttttgtaaatgacatcctgatatagagaagctactttttcgtaagccaatgttccattacgatacgtataggggaatgactgatcaggtgtatcgctgtatacataaacgtttagctgaccttgagcttcaacaaactcatatgttttagaagaatcagtatacatcaccatgtcaccctgactgctttttttcttcttttctgatccacgagcatcgaagatcgataatatctgatgctgcagccggctgttagccattgagatattctttttcatcggaagcgaaagactatgtaaacaacctgattcgccctcaaattccaaaacaattccaacttttgtttcaactctcaccatgcttccaagcaggctgtcgctttcaatatcagtgatctgataaggctgttttgatatgttcagcgctgtaaacatttgttccactttgtcgtgaatgtcttgttccgttatatgaacatgcagaagagagtcaagctgataaatcgaaggatcttcactaaaccccattaaggtttccttttcccaataaaataccgcgccatcatcagcatgatcttttttatgaagttgatttttcaggtaaatacgtacgactgtctggccgtcttcttgagatacctttgtttcgatatgatccttatgtaacacacgtccgtgtcgctcaaggaaagcgatggactttcgcttgtactcctgattcgttagctttttcccatgtgctttttgtaagtattcataattacgaattagctgcgatacttcatctacctcagctttgtaacctttgctttcaaatgagtagaaataatgcacatccatgtttgtatcgtgcaaataaagtgtttcatccgtaggaaaaaatgactttagtatctgttccgctttttctgatgaaatgtgctccccgacaaaattgaatgaatcatggacatttgctggctttgatacagcgaaagcagccgttcctatgttatatatcggatttaacagcaggacaaaaaacaccatgacagccatcgtcacccacttattcacacgcacataaacctttcctgacttttggaacagatgatagctcatcaaaaatcccgccattgccaaataaatcgtatatggcattactgcaccataatcttttgagatttgattgggatatggcgcaagcagcaagacaagcagtccgataatcagcgtataaaataagcctagtaagatcttatccgttctccaatacagcttgaaaaacactacattcaacgcaatgggaagagtgatgatgaaaaacagaaacacgaatgcaatcggctccatcccatccgggtattccttccaatacgaaaagaaactaaaaatcatttgtacgatcggcaaactgacaacagcaaggtcgaacgtataaaacttaccctttccgccatgatcacgcggcatcagcatatagtgaaaagccgtcagcagcacatatccgtataacaaaaaatgcagcagcggcagcagttcttttccgtcctctcttaagtaagcgctggtgaagtttgttgattgcacctggtgaataagttcaacagacactcccgccagcagcacaatccgcaatataacacccgccaagaacattgtgcgctgccggtttattttgggatgatgcaccaaaagatataagcccgccagaacaacaattgaccattgaatcagcagggtgctttgtctgcttaatataaaataacgttcgaaatgcaatacataatgactgaataactccaacacgaacaacaatcctttacttcttattaaggcctcattcggttagacagcggacttttcaaaaagtttcaagatgaaacaaaaatatctcatcttccccttgatatgtaaaaaacataactcttgaatgaaccaccacatgacacttgactcatcttgatattattcaacaaaaacaaacacaggacaatactatcaattttgtctagttatgttagtttttgttgagtattccagaatgctagtttaatataacaatataaagttttcagtattttcaaaaagggggatttattgtgggtttaggtaagaaattgtctgttgctgtcgctgcttcgtttatgagtttatcaatcagcctgccaggtgttcaggctgctgaaggtcatcagcttaaagagaatcaaacaaatttcctctccaaaaacgcgattgcgcaatcagaactctctgcaccaaatgacaaggctgtcaagcagtttttgaaaaagaacagcaacatttttaaaggtgacccttccaaaaggctgaagcttgttgaaagcacgactgatgcccttggatacaagcactttcgatatgcgcctgtcgttaacggagtgccaattaaagattcgcaagtgatcgttcacgtcgataaatccgataatgtctatgcggtcaatggtgaattacacaatcaatctgctgcaaaaacagataacagccaaaaagtctcttctgaaaaagcgctggcactcgctttcaaagctatcggcaaatcaccagacgctgtttctaacggagcggccaaaaacagcaataaagccgaattaaaagcgatagaaacaaaagacggcagctatcgtcttgcttacgacgtgacgattcgctatgtcgagcctgaacctgcaaactgggaagtcttagttgacgccgaaacaggcagcattttaaaacagcaaaataaagtagaacatgccgccgccactggaagcggaacaacgctaaagggcgcaactgttcctttgaacatctcttatgaaggcggaaaatatgttctaagagatctttcaaaaccaacaggcacccaaatcatcacatatgatttgcaaaacagacaaagccgccttccgggcacgcttgtctcaagcacaacgaaaacatttacatcttcatcacagcgggcagccgttgacgcacactataacctcggtaaagtgtacgattatttttattcaaactttaaacgaaacagctatgataacaaaggcagtaaaatcgtttcttccgttcactacggcactcaatacaataacgctgcatggacaggagaccagatgatttacggtgatggcgacggttcattcttctctccgctttccggctcattagatgtgacagcgcatgaaatgacacatggcgtcacccaagaaacagccaacttgatttatgaaaatcagccaggtgcattaaacgagtctttctctgacgtattcgggtattttaacgatacagaagactgggacatcggtgaagacattacggtcagccagcctgctcttcgcagcctgtccaaccctacaaaatacaaccagcctgacaattacgccaattaccgaaaccttccaaacacagatgaaggcgattatggcggtgtacacacaaacagcggaattccaaacaaagccgcttacaacaccatcacaaaacttggtgtatctaaatcacagcaaatctattaccgtgcgttaacaacgtacctcacgccttcttccacgttcaaagatgccaaggcagctctcattcagtctgcccgtgacctctacggctcaactgatgccgctaaagttgaagcagcctggaatgctgttggattgtaatattaggaaaagcctgagatccctcaggcttttattgttacatatcttgatttctctctcagctgaaacgacgaaaagatgctgccatgagacagaaaaccgctcctgatttgcataaagagggatgcagccgcaagtgcgcattttataaaagctaatgattcagtccacataattgatagacgaattctgctacaggtcacgtggctatgtgaaggatcgcgcgtccagttaagagcaaaaacattgacaaaaaaatttatttatgctaaaatttactattaatatatttgtatgtataataagattctcctggccaggggaatcttattttttgtggaggatcatttcatgaggaaaaatgagtccagcttaacgtctctaatttcagcttttgcccgtgcatatcacagccgatatgacacacctcttatttttgatgattttatcgcaaaagatctcattaacgaaaaagagtttatcgacatcagtaaaaatatgattcaagaaatatcgtttttcaacaaagagatcgccgaacgtcttcaaaatgatcctgaaaaaatattaaaatgggttgcacaaatccagctgtctccaacgcccctagcacgtgcttcttattgtgaaaaagtcttgcacaacgaattaatcctgggggcaaaacagtatgtcattcttggagcgggactggatactttctgctttcggcatccagaattagaaaacagcttacaggttttcgaggttgatcatccggccacacagcaattgaaaaaaaataagctgaaggatgcaaatctgacaattccgggtcatcttcattttgttcctatggatttcaccaaaacgttttcgtatgatcctctcttagatgaaggatttaaaaacacaaaaacattcttcagccttctcggagtgtcttattatgtaacacgggaagaaaatgcaagcttgatcagcaatttattttctcatgtcccgcctggaagctctattgtttttgattatgcggacgaaacactttttacagcaaaagggacgtcgaatcgagttgaacatatggtgaagatggctgccgcaagcggggaaccgatgaaatcatgtttcacttatcaagagattgaacatctgttagagtcatctggtttactgatctatgaacatctatcaccagacgacatcaatgaccttttctttagtaatcgaaaagacaatttgtcagcgtttgaaacgattcattatattcatgcggtaaaaaaataattttcaaatcatcagaagcctctcaatgtttgagaggctttttattgaacccgcatgcagcaaataagctgccattatcatacggcagcttctgctaaaggcttcaccaagatcataaatgatttgcctttctcatctttttccgttttcagctgttcaaagccgcattggcttaaaaacagtatccattccctgcgctcaatgggaactcccgcaaacatcgctttatgtttcgctctaagcaatttgctgatctgttcaatgatcatcttcgcatgtccctttttttcttcagccgggtcaatcaggaccgttccgagccacggcttaccgtttgaaggagaccactcgagatggtagctgacggcaacaggcataccgtctttttcccatacaagccatgaaccgttgtacatggagtaggaaatgatatagtcttctgcatctttatctccaaactcctcctctttccatacaggatgagcctccgcgagcttttctaacaagctgagatcatcctgctcaaatggcctacttccgagcatgaagatactcttcaaatatcgttttatgtatagatgggtttccggctagcacactgtggttttctaaaaaggtaaacggctctccttcaatggtcgtataggtgcctcctacttcatttaacagcacacagccggctgcgtagtcccatggcgcaagccgcatcgtgatgtaagcatctattcttcctgccgcgacatttgccagctctaaagcggcagaaccgtaggagcgtgtgcctctgactcttttcacaagtggcgctaacacactttgatcaattcttctgttttccgttacccatgttgcattaatggcaagaatcgcttcttcaatgacggtttcttttaatggagccagcttcgtttcattcatataagctcctctgccgctaaatgcgtgatacaactcatcgtgcaccacatcataaattaaaccgattttaccttcaccgttttcaaaaatcccaatggaaatcgcaaaatttctttgctggtgcacaaaattcatcgtcccatcaatcggatcaataatccatacgactccctcaagtgagtggattttgtctccttgcccctcttcaccgagtatccgatgtcccggaaatgtttcttgaattcgatcaatgaaaaacttttcggtttctttgtcaatattggtgactaaatcattcggatttgatttcgtttcaattgtcaggctttcatgcatggattgtgtaattctcgcgcctgcttctcttatccatttctttgcaatctcatcgatttccgtccaatttgtcattcgttcgtacctctcttctatgtagaccttttattttataggatactgataacggcaatgaaaaagcaaggaaaatgaaaaatatcccttctcacgtaaaaacgaaccattcatgcggttcgttttcactatcgcttttttacccgttaagacgaatccattcttttctaagtcgctcaagtttgtttttgctttgttcaatctgctcttcattttctttctgcattgcttcatatagggttgccaattcataatcaacctctagtctccagacagcaacacgattgtttttctcttccttaaatccctcttttacaacttgcctcattgtctttcgccccttccagagatcatttgtttgtaaaaaagcatcccattttgccattcaacaatgattacttcttatatcgtatgattgttctatttacgcgcaacatgattctgaaaattgtgtgtttacctactcgtttattaccacatttctccttacttcaaacgcgctcaatctttttgaagctcgtatgaactgtgataaaatatgtatacttagcatgaaggaggaaaatcatgacacaaatgcgtttcactgaagaagactttaacacatttacaatagaaggcttagacgcgcgcatggaagtattaaaagagacggtccgtccgaagcttacagctctaggcgaacattttgccccaactttatcagctttaaccggagatgaaatgtttccgcatgtggcaaagcacgcaagaagatccgtcaatcccccggctgacagctgggtggcgttcgcaaacagcaaaagaggctataaaaaactgccgcatttccaaattggtttatgggaaagccacgtctttgtatggttcgcgattatttatgaatcccctatcaaagaagaatacggcaaattgcttgaagtgaaccaagaaaccattacgaaaaatatccctgacagcttcgtttggtctgcagatcacacaaaaccgggagtacataaacagtctgaaatggacaaggaacagctgaagacactgtttgagcgtttgcagactgtaaagaaagccgagctgttatgcggcatccagctccaaaaagaagaagtgctgaatatgaataaccaggaattccttcagcgtatcgacgatgcctttaaacagcttgcttttctgtaccgtctcacccaaaaagtaacacaagcataaaaaagagccgggatatcccccggctctttttcttacatcttaatcttcgcgtgatcagattctctcgcctgtttgaccgtgcgataaggagaatatgtactttgttcctcaaactcgccgcatagctttttttcttcggccttccccggtacaatttccttgaaacggcggtaagctttaagcagttcttcacgatccgcccctttttcatatgcaagctcaacctgctggaaaaatgcaatcacatccactgcttcttcggttgtccaatcttcattcatcggatattgatactccattttcttcactccttgtagatttacttcccttaagagaaagcatcttcatttgatcataaattgttctttacattctttcaagttcataatataattcatttgttttacgtctaaaaaacggttgagaaactgattttaatacacactattatgcataggtatgattacaaaggtgggaaaacaattgtcgcaacatgaaacacccttatacacaggactgaaaaagcatgcaagcagacagcctgttcaattccacattcccggccataaaaaaggggcaggaatggacccagaattcagacaatttatcggtgaaaacgcgttaagcatagatttgattaatattgaaccattagacgatctgcacgcgccaaaaggcattattaaacaagcacaagatctggctgctgaagcatttggagcggatcatacatttttttctgttcaaggaacaagcggcgccattatgacaatggtaatggctgtttgcggacctggtgataaaattattattccaagaaatgttcataaatcaattatgacagctattgtattttccggagcggttccaatttttattcatcctgaaattgacaatgaattgggcatctcccacggaattacacttgaatctgctaaacgggcgcttaccgagcatccggatgcaaaagggcttctcgtcatcaacccgacatatttcggtgttgcagccgacttaaaaagcatcgtagaactcgctcattcgtttgatgtgccagtgcttgtggatgaagcacacggcgttcacattcattttcacgacgaattgccgctatcggctatgcaggcaggagcggacatagcagcgacaagtgtacacaagctgggcggatcactgacacaaagctctattttaaacatgagagaaggccttgtatctaaagacagagtgcaatccatcctgagcatgctgacaactacgtcaacttcttacttgcttctcgcttctttggatgttgccagaaaacgccttgcaacagaaggccgccagcttgctgaggaaacactcaagcttgccaatcagacgagagatcgcctcaatcagattgaaggcatttattgtgtcggttctgagattcttgggtcgaaagcagcttacagctatgatccgacaaaattgattatctctgtgaaaagtcttggcctgacaggacatgacgtggaaaaatggcttcgtgaatcctttaatattgaggtggagctttctgatctgtacaatattttgtgtattttcactcctggtgacagccaaaatgatgcagaccggcttgtagaggctttaactgagatcgcacagcaaatgtcagaacaagatgtaacacatcagcaaactgaggttctgcttccagaaatacctttattggcaatgactccgcgtgatgctttctatgcaaatacggaagtcatcccattaaaagaagcatccggacggattattgctgaatttgtcatggtatatccgcctggtattccaatcttcatcccaggagaaattattacagaagaaaacatcagctacatttttaaaaaccttgacgcaggcctccctgttcaaggacctgaggactcgactttacatatgatccgggtcatcaaagaacaaaaagcaattcaataaaaaataaaaagcatgcggctttaagccgcatgcttttttttactcttcatcaacaggacattgacattgtccgcagcaagttccatataatgttgtcactttctcatcttcaaagtaatgaatggcttcgttgcaatcttggcaaacaatcgtacccatctcttattccccatttctttgaaatttgaaaacgcttaatttcttttgttgttattatattaatatgtcacatttaaaatgtcaacaacaaactgtataacacattttatttcatatcatcatattcaccttgtttttccattttccatcatacaatatcttcttcatacagaagctttactcgatatatatgccacagcacataatgtaattgcacgttttcttgaactttcatccaagaatgcagcaaaaaattcaatataccccaggttgctattttaaacgattgatataatatgtaatctcactttaaaaacggtttcaattatataacaattaggtaacaagaagcagattaagccgtctctcgtgataaactaaagctagttaactactgtttatacagaggagaagatagatgcgatatcgcgcggtattccccatgctgataatagtatttgctttatcgggctgtacgctttccaccatcaatccgatgaaaaaaagccggattgacaacattcatcatacacaaatcctgtttttttctgatgagaaccaaatagaccaggaagcgccttattacgatgcactgcttgatttagaaaaagattatcccgagcaaatagataaaatgaaggtctatgataaaaaagaaggctgggaagatgagattgaaactgtccctacccttatggttgttgatcagcgccatgtcgtggtgaaaatcgagggatgtgtgaaaaagaaagaagacatcattaaaccattacagcatgtgctgtcaaaataaaaaaacagccctcgctcaaagcggggctgtttttgatatgaaaattattttacgatgtgaatcggacttccgattgccacttcagcagcttccattgtgatttcgcccaatgttgggtgagcgtgaattgtcattgcgatatcttcagcagtcatgccgccttcaatcgctaagcttaattcagaaatcatatcagaagcacttgctccggcgatttgcgcaccgatcacaagaccgtcctctttacgagtgatcagcttcatgaagccgtctgtttcgttaagagaaagcgcgcggccgtttgctgcaaatgggaatttagcagcaacaatgtcaagaccttcttctttcgcctgtgcttcagtgtaaccaactgatgcaagttcaggctcagagaaaacaaccgcaggaataccaaggtaatcgatttctgcaggctctccagcgatagcttctgcagcgattttaccttcgtaagatgctttatgagcaagcggcggtccttcgatgatatcaccgattgcataaatgttaggtacgtttgtgcggcactgtttgtcagttttcacgataccgcggtccgtcatttcgataccgacttgctcaagaccaagctcatcagtgtttggacggcgtcctactgtaatcaatacgtaatcagcatcaacagttttttcttcgccttttacttcgaaagtaactgttacgccgtctggtctttcttcaacgcctttagccatcgcgtttgtatggatttcaacgttgccttttttcttcagtctgcgtgtaacgagagaactcatttgtttttcgaagccaggaagaatttcatctccgccttcaagaataacaagttcagtaccgaagttagcatacgcagttccaagttcagttccgatgtatccgccgccgataacaacgagctttttaggaatttctttaagagccaaagcgccagttgaattcaggacacgctcactatatttgaagtttggcaattcgataggacgagaaccagtagcaatgattgcgtttttaaacgtgtatgtttgagcagagttctcatccataacacgaactgaattgctgtctacaaagtaagcttcaccttttacaacatctactttgttgcctttaagaagacctgctacaccgccagtaagcttgttgacaacagaagctttccattcttgaacttttgtgaaatcaactgttacattctcagcagtgattcccatgtcatcagaatgttttgcattctcataacggtgacctgcattgatcagcgcttttgaagggatacatccaacgttcagacaaacgcctccaagagttgctttttcaacgactgttactttttgtccaagctgtgcagcgcggatggcagctacatagccgccaggtcccgcaccaattacaagagtatctgtttcaatagggaaatctcctactaccataacattacgcctccattaaaattaattgtggatcgttcagtaaacgcttgatgtgatttaatgcattttgcgcagttgctccgtcgatcatacggtggtcgaagctgagagaaagagctaagactggagctgctacgatttcgccatcacgaacaatcgctttttctgcaatgcgtccgataccaagaatcgcaacttctggatggttgataaccggagtgaaccattgtccgccggcagaaccgatgtttgtaattgtgcaagatgcgcctttcatttcagctggagcaagcttgccttcacgagcttttgttgcaaggccattgatttcatcagaaatttcaaagacagatttacgatctgcatttttcacaaccggtacaagcaagcctttttcagtgtcagcagcgataccgatgttgaagtaatgtttttggatgacttcatctgttttatcgtcaattgacgtgtttaaaacagggaattttttcagtgcagatgtaagagcttttacaacgtaaggcaagtaagtcagcttgattccttgatcagcagcaacctgtttgaactgtttacgatgtgcaacaaggtttgttacgtccacttcgtccattaacgttacgtgaggagcagtgtgtttagagttaaccatcgcttttgcaattgctttacggataccgctcattttttcgcgtgtttctgggaattcgccctctggagctggtgcagcagccggtttagcagctgtttcttgtggtgcagctgtttcttgcggtgcagcttcttgcgctcctccgtttacaaagctgtcgatatcttcttttacaacacgtccgttgttgcctgaaccagtaaccttacggatgtctacacctttttcacgtgcatatttacgtacggaaggcatagcgatcacgcgtttgttcgggtcaacttcagcttgatcctgctgtcctgcgccagtagcttttgcaggctcttgagcttgctcttctttcgcaacgtcttgtccagcttctgcagttgactgaacttgtgcttcagttttcgcatcgtcagactcgtcgctgcctttaaattgaagatcttcgtaaccaggtgcatcaaacgtaataatcgtttgtccaacagttgcaaccgttccctcttcaacttttaattctaatacttttcctttaacaggtgaaggaatttctactactgctttatcattttggacttcagccagtacatcatcttcgtctacctcgtcgttaggcttgacaaaccattttacgatttcgccttcgtggataccttccccgatatctggaagtttaaattcaaatgccacagttctcgacctcctagtttgattaagcaattttaaagtttacatcgtaagcattgaaaacagatatataatagagggaaaacgttcatcttccctctcgattatgcagtttgattaaaattcaagcacttttcttgctgtttcaagaacgtctttatggtttggaagccatacgctctccgcttgagagaaaggaaatactgtatctggcgctgcaacgcgaagtacaggtgcttccaagctcaggatcgcacggtcattaatttctgctactacgtttgcagcaataccggcttgtttttgtgcctcttgaacgacaatcgcgcgtcctgttttttctacagaggcgataattgtatcgatatcaagtgggcttactgtacgaaggtcgacaacttcagcagaaatgccgtctttttcaagctcatcagcagcttttaatgattcatgaaccattgcgccgtaagtgatgattgaaagatcagtaccttcacgtttcacgtcagcttttccaagctcaattgtgtattcttcttcaggaacttcctgacggaaagaacggtaaagcttcatatgctctaagaagacaacaggatcattgtctctgatcgcagaaattaaaagtcctttggcatcgtaaggagttgatggaataacaactttgataccaggctgttgtgcaacaagaccttccaagctgtcagcgtgaagttcaggagtatgaacaccgccgccgaatggagaacgaattgttacaggtgaagtccagcgtccgccagaacggtagcgcatacgagccatttggccagaaactgaatccattacttcataaacaaatccgaagaattggatttccattaccggacggaagccgtttaagcctaaaccaagggcaagaccgccgataccagattcagcaagtggcgtgtcaaacacacggtcttcaccgaattctttttgcaatccttctgtcgcacggaatacgccgccgtttacaccaacgtcttctccgaaaactaagacattttcgtcatttttcagttctgtgcgtaacgcatccgtgattgcttgaatcattgtcatttgcgccatggcttacttcgactccttctgtgtataaatttcaaattgctcctcaaggttgtgaggcattttttcgtacatgattttcattaaatcagttactttttgcttcggttcagcatcagcttttttgatcgcttgcttaatttcttctttcgcatcctcaatcacttttgcttcttcttcttcagaccataagcctttgttttcaaggaacgcacggaaacgtacaagcggatctttttgttcccactcattttcgatttcttttgtacgatatttagtaggatcgtcaccagccattgtgtgcgggccataacggaatgtaagtgtttcaattagtgttggaccttcgccgttgattgcgcgctcgcgtgcttcagcagttgctgcgtatacagcaagcggatccattccgtctacttgtacgccgacaataccggcagctacagctttttgtgcaattgtttcagctgcagattgtttttcaacaggagttgaaatcgcgtaacggttgttttgcaccacgaagattgcaggtgctttataagctccggcaaagttaattccttcgtagaagtccccttgagaagctccgccgtcaccagtgtaagtgattgcgacagctttcttaccgcgttttttaagacctagcgcaacaccggcagtttgaatgtattgagcaccgataatgatttgtggagaaagggcattcacatcatcaggcatttggtttcctctgaaatgtccgcgagagaaaagaaacgcttgatataatggaaggccgtgccaaattaactgaggcacatcacggtatccaggaagaacaaagtcttctttttcaagcgcgaaatgcgttgcaatctgagaagcttcttgacccgcagtaggagcgtaaaatccgagacgtccttgacggtttaatgagatagagcgttggtcaagcacacgcgtaaataccatgcggcgcattagctcttttaattgatcatcagttaaatcaggcatcgccgcttcattcacgacttctcccttttcatttaaaatttggaacgtttcgaactgctttttaatggcatcaaattgcttcttactgtcaacgatagcttttttcgtttttgcagccatactaagtcacctcttcctttcttttaaacagtcattagacgtgcattccttttatacatacaaacttagggtaccctaaagtatcagcagtaagtcgtattatattttagccgatccccagtttgccaaaaccttttatgtaggatagttacactctgctttgaactgtattatttcgaagttgtaaaaaactaatacaacaccgcttaacatggattagtttacaccaaataaagaagaaccgtcaatcgttttcatcgctgattttcaataaatgtattcgctttacattttcatcaaaaaaacagatgccaaccgcacccaaaactgtactagtataccttactatgctgtactacaatagaaatgaaaattttgaacgaaatccgaatcgcatttcattcaaaaaaagagctgatcgagtcagctctttttcacacgatagcctgcagcatcatataaatcttcccgggctttattatatttttcggtttgttcattaaattctccgctatatttaaggatcttttcataagaagcattgactttatcgatctgctgatccagatcatctcttgtcaaatctttgtctttcagctgcatatacagttttttattaagctcaagcgcttttttatactctttatacatagtgccatatgatgtatatcttttctccatatggtttgctgcggcatcggccttttcttttatgtctttttccttaatatgttccgctgacgtttttgcttcctcaaattctgtttccgattttttcatgctgtcattttcaagctttaggtgttcttcgcgcttgctgacattttcaagcgccttattagataaagcaacaatttttttataatcatccatattgagcttcataacactatcgtaaagctgattttctttggcctctaattctttgagtgtgttttgttcttcttgaaacggcttttccgattccgcggctttttctaatgaatgatgaagtgaatcaaccgggtcctgtcccatgcatcctgttaatatcagtgccatggcacaaaaagctccgatcttgattccaggccgccgttttatagcgtctttcacgttaaatcccccaatcttgacaatttctactatagaatccatggggacatttggcaatagccgtgctgtataaatgcaatactgaaattaaatcaaaaaagtgaaaaatcaggacagatgaccatacaacttttttgtttttacataggttatattagacgctatgcctacttataaaggctctggcgtaattaaaagaggaggttatgtaatatgtatggatatggttacggcggaggctgctgcagttatggtggttacggatatggtggctgcggatatggctacggccgcacctttgcgctaatcgttgttttattcattctgttaatcattgtcggagctgcttatttaggtggaggctgttgctaaccacacagcatgaaattgaccagccatatacggctggtcattcgtttcgttgcacctttgtgaagaaatccgatataatttacatattaagctttaggagtgaagtttcttgattactatggaaaacatcgtacgtgacggccatccagccctcagagagactgccgaacctgttgagctgcctccaactgatgcagaaaaacagcagctggccgacatgatcgaatttgttaaaaacagccaaaatccagaattagccgaaaaatacaagctgcgccctggcgtaggactcgcagctcctcaaattaatatcaaaaaacgaatgatcgccgttcatgcggaagatgcttccggtaaattatacagctatgctctgtttaatcctaagatcgtcagccattcagttgaaaaaagctacttaacaagcggcgagggctgcctctctgtggatgaagcgattcccggttatgttccccgctatgctcgcatcagagtaaaaggaacaacactagaaggcgaaaatattgatattcgtttaaaaggatttccggctattgtgtttcagcatgagatcgatcatttgaacggcgttatgttctatgatcatattgataaggaaaatcctttcaaagaacctgaaaatgcaatcgcaattgagcgctaaaagagaaaacggctggcacaatgccagccgtttctttattttaaaaggcccaattctttgacagcgtatgcaattccatcctcgtccaccggttttgttacaaagtccgcgatttctttcagttcgggaacagcatttcccatagcaacgcctgtcccaacgtattcaatcatttgcaaatcatttaatccgtcgccgaaagcatatgtatcgccgatatcaaacggaagacgctcaatcacttttttgattccttctgccttcgaacctccgtgcggcagaacatcagtcgatagctcatgccagcgaactagatcaaactcaggaaaagcggcataagctttttcttcttcatcctgacaaaataaaagaagctgaaaaatttcttttccttcataaaaaaggtcatcggtctctggataatctgttttaaggctgccgattccctcgagaacatgggggtgatccgcaacagtcgctttcatcgtgtcctcagccataaacacaacaggatgcttgccttcatccgcctgctttaataatcgcctgattgcattttcaggcagcggatttttataaatcacttgattttcaaagacaacaaactgtccattgtaggaaataaatgagtggatgcccagctcctccaaaatcggcttaaccaaaaatggagaccggccgctggcaataaacacatgatgcccttggcgctgaagctccgccacggtttttctcgtactttccggtatattcttatcatgatcatatattgtgccgtcaatatcaaaaaagattaatttagaatccatcgcaacttcccctttatcgtcttggtctgcaattcccaccctcatcatacaaaaagattgtcattcagcaaacaatttcgttcaaaaatcatattaaattccattaataaccacgaaaagtcttcctcaatctccgtatactatttgtataaaagaactctgggacaaatttttcattaaaggagggactggctaatgctgcgtaaattaagaaagaaactcagaagacaatggaacggaatgctccgtaagaaagcaattgcctgacaagggatctttcactttttgagagatccttattttgctcaaggctttccttatattccgttttcgaatataatagaatgagcgagtctaacatacggcatttaaggagagatttggaatgatttataaggtattttatcaagagaaggctgacgaagtacctgttcgggaaaagacagattcactttatattgaaggcgtatctgagcgtgacgtcagaacaaagctgaaagaaaagaaatttaatattgagtttattacacctgttgatggtgcattcttagaatatgaacaacagagcgaaaattttaaagtattggagttatgagcggtatgaaatttgtaaaaaatgatcagactgctgttttcgccctcggaggtttgggcgaaatcggtaaaaatacgtacgcggtgcaattccaggatgaaattgtactgattgatgcggggatcaagtttcccgaggacgaactgctcggaattgactacgtcatccctgattatacgtatttagtcaaaaacgaagataaaattaaagggctttttatcacccacgggcacgaagaccacatcggcggtattccatacctgctcagacaagtgaatattcctgtatacggcggaaaactcgcgatcggcttacttcggaataaacttgaagagcatggattattgagacagacgaaactgaacattatcggcgaggatgatattgtaaagttccgcaaaacggctgtgtcattcttcagaacaacacacagtattccggattcctacggcattgttgtaaaaacgccgcccggaaacatcgtacatactggggatttcaaattcgactttactccagtcggcgagccggcaaacttaacgaaaatggccgaaatcggtaaagaaggcgttttgtgccttctttcagacagcacaaacagtgaaaatccggagtttaccatgtctgagcgccgtgtaggagaaagcattcatgacattttccgcaaggtggacggccgaattatcttcgccacatttgcgtcgaatattcaccgcttgcagcaggtaattgaagctgctgtacaaaatggaagaaaagttgccgtatttggacgcagtatggaatcggctatcgaaattggacagacactcggttatattaactgtcctaaaaatacgtttattgagcataacgaaatcaatcgtatgcctgctaataaagtaacaattttatgtacaggaagccaaggggaaccaatggcggcgttatcaagaattgcaaacggcacacaccgccaaatttcaatcaatcctggggatacagtcgtattttcttcatcccctatcccaggcaacacaatcagcgtgagtcgaacaatcaaccagctgtatcgtgcgggtgctgaggttattcacggccctcttaacgatatccatacatccggtcacggcggacaggaagaacagaagctgatgcttcgtttaatcaagcctaaattcttcatgccgattcacggtgagtacagaatgcaaaagatgcatgtcaaacttgcaacagattgtggcatcccagaggaaaactgctttatcatggataatggtgaagtattagcacttaaaggcgatgaggcttcagttgcaggaaaaatcccgtccggttcagtgtacattgacggaagcggtatcggtgatattggcaatatcgtacttcgtgatcgcagaattctctctgaagaaggacttgtcatcgttgttgtcagcattgacatggacgacttcaagatttcagcgggtcctgatttgatttccagaggatttgtgtacatgagagaatctggtgacttgatcaacgacgctcaagagctcatttcaaatcacttacaaaaagtaatggaacgaaaaacgactcaatggtctgaaatcaaaaacgaaattacagacacgcttgcacctttcttgtacgaaaaaacaaagcgccgtccaatgatcctgccgatcattatggaggtttaaaaaaagaggcactccctaagggagtgcctctttttattgcagtgatatgtgttgaaatgattttacatcgaataatcccgtagtcgtcattttaatatcaggaatgacaggcaacgctaaaaacgacaatgtcaaaaatggattaaatccgcctgtgaaaccgattaacgacaatttatcatgaagcgtcagcaagctttgattcacttgctctgcagattggtcggataataaccctgcaatcggcagcggtactgaatggagctcttccccattttttataattgttaatcctccgccaatttcctgcagcttattaactgccgccgcgatatcctcatcattcgttccgacggcaataatattatgggagtcgtgtgaaatggttgtggcaatcgctccgctcttgaatccaaaacctttcacaacaccaagtccggtttcttttaatcctttatgccgctcgacaactgcaatctttaacaaatcaagctcagtgtcaggctcaaattcgcgggcaacaggagccggaacttgtactaatcgtgtttcaagctgatttggtatgatttgaatgacattgatctgctgctctgaatcgattggcatatgaaaatcctgtttgttaagaggagcagcaagcttaacagaatcaagcagtgcctgatctggtgctgcagttgaagcatgatcctgatagaccgctttgctgtcttcagcaacagtctgcccttttaccatcgtcattgtgacagtgacattttccagatcagatacaaaaagcaaatcagcgtcaaaacccggggcaatcgctccctttgtatctaatccgtagcattcggctgcattgaggcttcctagctgataggctaaaaacggattaagtccggcttgaatcgccattttcacctgatggtttacacttccctctgacaataaatcatccacatgcttatcatccgtacagaaaaagaaccggcgtgcgttcttttcattcaccgccggcagcacattgagcgtgtttttggcgactgatccttcacgcatcatgacatacatgccccttctgatacgatcaagggcttcttccttcgatgttacttcatggtcgtttaagacaaatgcggttctgtaaatgttaatgaggtctgttgataaaccagctaaatgaccgtctatcctttttcctgccacacgggcatcaagcagtttctgaaccatgtctttttcagcctgctgaaccgacacataatccataacttcagccagccctaatacttcttcttcttcataaaaaggcttgagatcggcagctttgagaattgcgcctgatcgctcaaaacttgcggcaggcacactggaaggaagcataaaatggatattcagcggtgtatgccgagcttgttcaagcataaactcaatccctttttcaccagacacattcgcgatctcatgcggatctgtaacaaccgtcgtcacgccatgaggcaacactgctttagcgaactcaatcggtgtaaccattgacgactcaatatgtacatgtccatcaataaaacccggaacaatcatttgtccctctgcatcaatgatattttcgccttcatactcaccgaggcctacaataactccatctgtaatcgcaatatcttcatatatccattcttgattatatacgtccatgatttttccgtttttaatgacgatatcagctttttgtcttttggctgaagcattcagcctattgactagcgcttctttattcaaataggcccctcctttttttattatatggtacaatatgctatcggaacgcctgtgcttagtcaatgaaattttaagaaattgacgctcagttcattaaagttgttatattctgataatatgaaaaaccgccctttgaggacggcttatttggctgctattttgtatgaagaactcttttttcgaaacgggagatgtctgtaactgatccaataacaatgagtatatcttcttggtggatgacttcggttgcaagcggtgatacgatgacttccttgcccctttttatggctacgatgttaataccgtattttgcgcgaatatctaaatcgagaagcgtatttccagccaggcggctgttagctacgatttcaacaagactatgctcttcagacagctccaaatagtcaagtacattgttggacacgatattatgcgcaattcgttttgccatatcgcgttccgggtggacgatgtgatccgcaccaattttagacagcactttttcgtgataatcgttctgcgctttaactgtaatcgtatggacgccaagttctttcagaatgagtgtcgttaaaatactcgcttgaatattttccccgattgctacaataacgtggtcaaaatttcgcaggcctaaatttttcaggacagattcgtctgtcgaatcaccgataactgcgtgagatgcaatcttggcatactcgttgactttatcttcatcgatatccattgccataacctcgacgccttcttcgcttaatgctttgcaaatactgccaccaaaacggcccagcccaattaccgcaaattcttttttcatcgtggtgctcctttatatgacatgatattgatcaaattttatcatattcttttgttacagtgttatccttttggcagcgaattcatatgccgcttgagcttttcagtaaactcaggcgacaaatacagctccgctccgcgttcgatttcaatctgatagtgctgaggcggggcaatttccgcttctttttggaggacgagaaaggttaaacagtctttgtagtgccttccgccagcttcaacgtctacaaatgccggccgatacgtaagagattcgacgccctcccttttatatagataggagagagcagaataagggatacggtataaaacgccttctgttgttcctccgtcttccaacatgtccgctcttgaaccgtcttccctttttagcgtgaagcgggttgtgtatccttttaaaacagctcttcctactggatcttgaaaatagtgatcgactcccgctttttgaaagcgggcattatccatgcatgatccataggcaaaataataaatgggatttttcgatttgctgatcatctgatgttctttccagtcgccgctgcttattttcgtaaaaccggcacacccgtctttgttcataaaataaataagcgcaattttaatcccgacatccgtttctacaaacaccgtttgtttatgatatccttgaaaaaattgatcgagcttatgtatacacaattcatctgcttcatatacttcgccatatatatagccttcatcttcatcattgaaaacaactgtgggcccctcttttgcagcaaacaaacttccctttgttctcgcctgctcattgatacatgccgattgtgccagcaaatgatggtttttttcatgctttcttaatgtcccgtatacaaacagaagcgagttcactttatttttctcctctcagctgtctgattttaaaggcaaaaccacttgaaagacgctgccttttccagcttcactttcgattttcaattccccgtcatgttccttcaggattctcaaacaaatgggaagtcccagtccagtgcccttttcttttgttgaataaaaaggtttgccaatctgcttcagcttttcctgcggcatgccgtttccttcatcctttacgcttatcactgcatgagaggcggttttagcagttgaaatggttacgacaccgccctttggcattgcctcaattccgtttttaatgatgttgataaagacctgcttcagctgattttcgtctccattaatcatacagccatctgtctctttgaaatttttctctatgacgatattggacagaattgcattggtatcaagcaatgtcgtgacttgtttcaagatctcattaagctggtgtgttttaaatgtgattgcctgcggttttgcaagcagcagcagctcgctgagcactaaatcgattcttttaatctctgaaaagatgatgtcaaaatagtcttttctgtccggatattgtgttttcataatctggaggaaaccgctgacagatgttaaagggtttctgacctcatgagcaatacctgcggcaagttcacttgtgattgatagtttctgggattccctcgccagccgttcattaatctcaatgagctcatcttcagcctctttccgctcagtgatatctgacattgtacccaggctgcctgtaaattggtcatcccggtcatagtaaagtttataatgaacttctccccaaaaaatcgtgccgttttttgtcacgtattttgccgtaaacatgccagaagacgctttgttttggatttgggtgttaatgtggtcggctacgtgcttttcttttatgaagtaatcgttatacattgttcccatacattcactgattgaaaacccggttatagatgcccacgcttggtttaaatatgtaatttcaccttttgcattcgtttgaaatacgatttcctgcaaattatccatgatgcggtttttttcttcagaaagctgtttatacttccattcgttatccttcattttcttaaccagctgctgtttctcatcaatataataagccaacatccagacacttaccagcgtgactgcagtatacacaatatcaacaggccaattaatcgggtttttgcctataaaataaaataaataatcccaaaacattataaaaatcattgccaaaatgatggaaatgatacgagcttgatattttctcatatgaccacctgccgcttgtgtttctctacttattgtaccattcttcgacaaataattgagtaaaatatgtaaagtatcccaaatcattcattaccaaatatcttgatgtcttatcttaggcggcggtaatcaaaaattggcacgcaaaaaaggcggagatgatatcactccgccttttttagcataattttattcttttaaagcggcttgaatttcttcgagaagcagctgtgcaccctcagggcttagcgtaattttaccgttgccgtattctttattttctgaagtgatttctccagtcattaaacaaacgccatgaggtttgtactttttcaagataattttatctccgtcaacaaaaaactcaatgctgtcttttatggcaatatccaatgcccgtctcaactcaatcggcatgacaatgcggcctaattcatctacttttctcacaacacctattgatttcataaaaacccttcttcctttaaatgtttcttttctcatgtaatgttttaaggatgtacctcaatatatcgtagacgaatgaaactttgaaaaagtttcccgctttctataagaattacaagatattttttccataaaaccgaaaaatgtattacttctgttacacagttccttgattttttacaaaaacatttctttaccgacgcacacccccaaaaatcgcagtatttctgagaaactttaaatgtagaatcatattaaattaggatagagattgggtgaaaacatgtttcaatcaactgaaatcgggattgacttaggaacagctaatatacttgtttacagcaaaaataaagggattatcctaaatgaaccatctgttgtcgcagtggatacgacgacaaaagcagtgcttgcaatcggagctgacgcgaaaaacatgatcggtaaaacaccgggaaaaattgtcgctgtcagaccgatgaaagatggcgtgatcgcagactatgatatgacaactgacctgctaaagcacattatgaaaaaagccgcaaaaagcatcggcatgtcgttcagaaaaccgaacgtagtcgtttgcacaccatcaggctcaacagcagtagaacgccgcgccatcagtgatgcggtgaaaaattgcggcgcgaaaaacgttcatttaatcgaagagccagttgcagccgccatcggagcggatttaccggttgatgagccggttgccaatgtggtagtagatatcggcggagggacgacagaggtcgctattatttccttcggtggcgttgtttcctgccattctatcaggatcggcggagaccagcttgatgaggatatcgtttctttcgtccgtaaaaaatacaatttgctgatcggcgaacgcacagctgagcaggtaaaaatggaaattggccatgctctgattgaacatataccagaggcaatggaaattcggggacgtgacctcgtgacaggtcttccaaaaaccattatgcttcaatccaacgaaattcaagatgcaatgcgtgaatccctcctgcatattcttgaagccatcagagcgacacttgaggactgtccgcctgaattgagcggagatattgttgatcgcggcgttattttaacaggcggcggcgcgctccttaatggaattaaagaatggctcacagaagagattgtcgtgcctgtacacgtggcgcaaaacccgcttgaatctgtagcaatcggcacaggccgttctttagaagtgattgataagctgcaaaaggcaattaaatagtctttacccgcaaaattctcacacgcggcaaatttcttgcttcttttttcctcacttccttcatattgtgggaaatggagaaacgttaaggaggaaacagatgctaagagatttaggaagaagagtagcgatcgcagccattttaagcggaattattcttggaggcatgagcatttctttggcaaatatgccccattcgcctgcaggcggcactgtaaaactgaatcatccataatattgaaaaaacccaagacgtgtcgttttgggtttttcactttgggctccttctttcctttataggatcatatttgatatgatgagaaaaaagcttggaggaatgattcatggattcattttcacagaaattaaatacatatgcacagctggcggtagaagtcggcgttaatgtccaaaaaggccagtatgtagtcgtaaatgcttcaacagacgttcgggattttgtccgtttaattgtaaaacacgcatatgaaaagggcgcaaaaaacgtcaccgtgaattggcaggatgacgaagtcgccaaattaaaatacgaacttgcgccgtttgaagcatttgaagaatatcctgaatgggaagcaaaaggcagagaagagcttgccaaaaatggagctgctttcatttctgttgtgtcgtcgaacccagacttgctaaaaggtatagattccaaacggattgcggcattccaaaaagcagcaggcaaagcattacatacatacagacaatatattcaatcagacaaagtcagctggactgtcgtaggtgcggcatcagcaggctgggctcacaaggtgtttcctggcaaatcagaggaggaagcgatccaccttctgtgggaagaaatttttaaagcgacgcgcgtaaatgaagacaacccggttcaggcgtggatcaatcatgaccaaaatcttcatgaaaaagttgaccatttgaacgagagacattacgctgccttacattatcaagcagaaggaactgatctaacaattaagctgcctaggaagcatgtttgggcaggtgcgggaagcgtgaatgaaagtggccatgagtttatggccaatatgccgacagaagaagtgttcacgctgccgcaaaaagacggggttgacggagtggtatcaagcacaaaaccattaagctacggcggaaatattattgaaaatttcaccctgacgtttgaaaatggccgtatagtcgacattaaagctgaaaaaggtgaggatattttaaaagaactggtggaaacagatgaaggttctcactatttaggtgaagtggcacttgttccttacgattcgcctatatcacaatcaaacattcttttctataacacgctgtttgatgaaaacgcgtcaaatcatttggcgatcggaagcgcctatgcctttaatattgaaggcggaaagcagatgtctcgtgaagagcttgtcaaagaaggcctaaatgaaagcattacacacgtggactttatgatcggttctaaggatatgaatattgacggaattacggcagacgggaaaagagagcctatcttcagaaacggaaattgggctttttaagtaaataaaaggaggcttttccgcctcctttttttatttttctgcttcatacatttgcagattcgcataaacggtttctaatactggtgcagcgagagataaacgttttgctttttcaatcaaaaatccatgcaggtggtcgccttctgtcgtttggccgttttccatatcccgaagcatggaggacttcatatggtaagacatgctggtcatcgtacgaaagctctcttcctcaagagccggatcagccggaacaccttcttttcgtaaaacagtgcaaatttccccaataagagtttgggccgtgtgacgtccggcttctgtggcgaggattgggccaagcggtcgttgaaataacgttgtgatccccgcttgcgctgcaataaagagatactttttccaaatgtccttctcgatatgcccgctaatgatgacttcagccttcacacctgaaaatgcctcttcaagcgctcttatccgctccgtacgctcgccgttccattctccaaatacaaaacgatgcgatgcgctcgtatgatgaatttctcctttgttgtctaaagcactttctataaaacacaggccgcccagcacctgttcttttgaaaatgccgcaaatagctgctcatagtggcggtacccatttaaaaaagggataatgacagattcttgatggataaatggtttgacatcctctatcacttgaccaagcgagtatgctttagaagcaatgataacgacatcaaattgccctgtttctccggcactgattagttcgggctgaaatgatacattccctttttcactatggatgacaagcccggtttttttaagctgctcagctcgtttttggcgcacgagaaatgtcacatcatttcctttctccgaaagccgtccgccaatatacccgcctactccacctgctccgacaaccaaaaatttcatgttgtgatctcctttcacatttaggtatcaaaaaaagcagagaaatctctgcttttttattcggcgtatagttcagtcaattttttctgcacatcagcattttcaaggaactcgtcatagctcatttgcttatcgacgatgccgttaggtgtaatttctataattctgttggcaatggtctgcacaaactgatggtcatgggaagtaaacagcatagcgcctttaaagctgattaagccgttattgagcgctgtaatggactctaggtctaaatggttggtcggctcatccaaaattaaaatattggcgccagaaagcatcgctttcgacagcatacagcggaccttttctcccccggaaagtacatttgcttttttgtggacttcttctccagagaacagcatgcgtcctaagaaaccgcgtaaaaagctctcactttggtcgtgcggagaatattggcgaagccagtctacaaggttcagatcactgccttcgaaatattcgctgttgtcttttggaaaatacgcttgagatgtggtaacaccccatttaaacgttccgctgtcagcttccatttccccggaaatgattttaaacagcgtagtaacagcaagttcatttcggccagtgaaagcaattttatcttctcgattcataataaagctgacattgtcaagcacctttacgccatcgattgtttttgttaagccttccacgcgaagaacatcatttccgatttcccgttccggcgtgaagttaacataaggatagcggcgggaagacggtttaatatcatccagcgtgattttttcgagaagtttctttcttgatgtagcctgcttagatttagacgcattggcgctgaatctagcgacaaactcttgaagctgtttaatctgctcttcttttttcttgttcgcttcttgagaaagctttaacgccagctggcttgactcgtaccagaaatcatagtttccgacatagatttgaattttgttaaaatcaaggtcggcaatgtgcgtacatactttatttaaaaagtgacggtcatgggatacgacaataactgtgttttcaaagttaatcagaaactcttcaagccactgaattgcctgaaggtccaggtggttcgtcggctcatcgagcagcagaacatccggcttgccgaataatgcctgtgccaagagaacttttaccttctccgaaccgccgaggtctgccatcttttttgtgtgcagatcttctgagataccaaggccttttaacaggatcgcagcttcactttccgcttcccaaccgttcagttccgcgaattcaccttctagctcagcagcacgaatcccatcctcatctgagaaatcaggcttcatgtaaatagcgtctttctcctgcatgacttcatacaggcgtttgtggcccataatgaccactttcagcacttcatactcttcgtactcaaaatggttctgcttcaagacggcaagacgctcgccaggactcatatgcacgtcgcctgtctgaggctcgatttcgcctgacagcacctttagaaacgttgatttaccggcaccgtttgcaccaattaacccatagcagttgcctggggtaaatttaatattaacatcttcaaataacttgcgatccgcaaaccgcaagcttacattatttacagcaatcatttattatcctccatcatgtctatcatcaataaaagtataccatgaatgcagggcaagagaaatgattccctgataaaacagagagaaaacacttatacacccaaaccagccagctgtgttacaattaaagagagagaatgcatccgcctggaaaattacacactctcatggaggaacacgttgaggcttttaacacttactgaatattgcttactgatcttttttacgggcttttaccttgccgtaacaggctttaccgccaaagatatcggcttatatataggcatagcccttatttacatattttcgcacattttttctaaacggctattagaaaagcgcggaaaagagaacaaacaggttcaccttttcttcagtgtgctggctattatcggttcagtgttcatcacggttttatgcattgcattggtcgcttctttttcaaaataaaaacgcctgctgtcctaggccagcaaggcgtttttattttgtttgacgcatttcgttaaacgggaaaaagacaaacttcgatgtgccgacaattcgatcttccgcgatcagtcccagcccgtttcggctgtccatagaattcagccggttatctcccatgacaaagtatttgcctttcggaaccttaaccggtccaaagtctcctgtcagactgacaccaagtttttctgcttccttcttgtttttagacaagtaaggctcggctacttttttaccgtttatataaagcgtgtcatccttcatttgaacggtttctccaggctttccgatcaatctttttacataatggattttagaagtttcaccgttgataataacgatatctccgcgcttcagctcgccgatatagttgactgttttattcacaaacagcctttctccgtcatgtaatgtgggatacatagatgaaccttcaactaaatacggttcaaacaaaaagtgacggatcaggagagccagcagaacagcgatgacaatcgctttaccccattccaggtacgtattggtttttttcttcgccgttttctcagtattcgtatttttttcctcggtcaaagtgtttcctcctagacaattgctatgtcagttgtttctcttcttttactttatcataaaaaagaataaaatacataacttaaccgcgctccctgccggccggataagaaaaagcgtcctttcgaaccaaggacgctttttttcttatttttctgtaacaggttttttgacgataccgaggataattgccatcacgacagcaccgatcacgatacttaaaaggtaaagcatcggatggtttgtaatgaaagctacgaatactcctccatgaggcgccggaagcgttactcggaagaattcagttaatccgccggcaacagctgcaccgactacagcagctggtatgacgcgaagcggatcagccgcagcaaatgggatcgctccctctgttacgaaagcagctcccatgaaatagcatgtaataccagcttcacggtcacgctgagtgaatttgtttctgaaaatggttgttgcaagtgcgataccaagcggaggaaccataccgccggccatgattgctgcatgaggcgcatagttgcctgcatcgatcatggcgataccgaacgtaaaggctgctttattaagcggaccgcccatatcgatcgccatcatgccgcccaagataatacccattaacacaaggtttccagtaccaaggctttcaagccagtttgttaagaaattcataaatgccgctacaggtgtattgacgacaaattgcattaatacgccagtgataaaaataccgaacagcgggtaaatcaaaacaggttttaatccatcaagtgactgagggataaacgtaaatacttttttcagtaaaatcacgacataaccggcaaggaatccggcaattaagccgcctaagaatccagcattcgcttgagttgccataaatccgccgaccataccaggcgcaaaaccaggacgatctgcaatactcatcgcaatgaaaccggccagaactgcaacaatgagttttaatgcattgtcgccgccgataaagtttaatgctgctgcaaacgtgttgtagctaggatcattcggatcagcagagtgaattccccagaagaatgaaatcgcaacgagaataccgccgccgactacgaacggaagcatgttgctgacaccgctcatcaggtgcttataaaacgtgtttccgataccgcttccagacttgcctttcgcttcttcatcatcatttgaagctgctgaaccgccgccgctgccttgataaatcggcgcatcttgattcatcgctttttcgataagctcttgcggacgtctgatacccgccgttacaggaacttgaagtacgcgcttgcctttaaaacgttccatttcaacctgcttgtccgctgcgacaatgattgcaggtgcatcttcgatttcttgggcagtgagcttgtgcttaatgccgcttgacccatttgtttcgaccttaatttccacaccaagctctttcgctttttctttaagggcatccgcagccatgaatgtatgggcaatacctgtcgggcatgcagtaaccgctaaaattttcccttttccggcaggtgctggtgccgcttcttcttcctcttcctcttcgtcatcatctttatcgtgctgattaataatgtcgatgatggcatcttcagactcagcttcaaggagctgcttacggatttcttcacgcattaacagcgttgaaagtcttgacaatgcttcaaggtgagtgttgtttgcgccttcagtcgccgcgatcatgaacactaagtgagccggctggccgtctaatgattcataatcgacgccgtcttttgaacgtccgaacgcgatcgccgggttgataacgcttgccgttttcgcatgggggatagcgattccttcaccgatacccgtggagctttggctttcgcgatttaaaatggcttctttataggcttgtcggtcatttaactttccagccttatcaagaacagtgaccatttcgtcaataacattttctttttctttgctctcaatattaagctttatcgtatgcttcgttaaaagctcagttattttcacttgtgtttcctcctctatagacgtgtgaccttaacttcaggaagaagctgctggacaaattcttctgttccaagttcttcagagaacgcggtagcactgcctgaagtaactcctaagcggaatgcttcttcaagcggcagctgtttggaaattccggcaaggaaacctgcaacaacggaatcccctgctccgactgagtttaccaatttcccctttggcacgttagcaaaataaacagcttcgttcgtaaacagaagcgctccgtctccggccattgatacgattacatgttcagcgccttgttctacaagctttttcccataaggaacggcttcctcaacagatgtaatggccgtgccgaacatttctccaagctcatgatgatttggcttcatcaaaaatggtttcatttctgttgctttcaaaagagcctcgcctgagatatccagaacaactcgtgcgttctgctgtttgcaggcctctgcgattttttcataagtatcgtgagggagtgaagatggaatgcttcctgcaagaacaacgatatctccctcttgcaaagattggaactgttctaaaaaggctttgaaatcttcatccgaaattgtcggtccctgcccgttaatttcagtttcatcacccgttttcagctttacattgatacgggtatccccttttacttcagaaaaagctgtttccaggttttcttcccgtaaaaatgttttgatatattctccggtaaatccgccgacgaatccgagcgctttagacgccacatggtgtcttttcagcagtctcgatacgttgatgcctttgccccctggatacttggtatcatacgaagaacggttcaggcctcctacagtaaaatcttcaacgtgaactatataatcgacagatggattaagtgttacagtgtaaatcatggtttcactacctttacgacagttttttcttggtaattatcgaatgtaagctcttcagcgtcagtcgtaatgattgttgcgtcgcctattccggcgaatgccgaaaatgaaatttctccgaacttcgaagggtctgctaagacgtaagcgtgttttgcctgtttgatcgctttctgttttaaaagggcctcatcagggtccggcgttgtaaatccagcctctgtatggacaccgtttgtccccagaaaactcttgtcaaatctgtactggtccatggcaaccaatgaagcgcctccaataatcgcgcccgttctgtgctttacgtatcctccaagcagataaaaagaaatttctttccttattaatgcatcgatatgcattaccccgtttgtgacaacgacaatatctttggttttatccataaaatcaatcatgtgcaatgtcgtcgtgcctgcatcaaggtaaatgcaatccccttcttctaaaagagaagcagctttttcagcaatcttcagtttatcgtgaaggtttttggatgatttttcaagcatatcgggttcaagtctgatatcggaaagcttggccgctccaccatgaacgcgctttaaaaaaccgcgttcttcaagggtcgataaatctcttctgattgttgattcagaagcattagtcagatttataagctcttgaatctttaccacatcatgcttttctatttgatcaataatcaattgatgccgttcaggagttagcatgcttcacctcctaatgaaaacgtattcattttgaatacaatttcattgtaaacgctattttcggtttaggcaactaaaatcattcaaattcattcaataactatcaaaatctttcacgtttctccatattaacgtatgtctatagggtttgtaaactgtaaattcgacaaaaataaggacaattgtacgacattttcttcttattttaatgaaaaaagtcttttatattcatagtagaaatcactaaacataaaaaaacctcatgcatgttgcatgaggctactcataacgcagcgcttcaatgggatcaagctttgcggctttatttgcaggaagcatgccgaaaataacaccaatgagcatactgaacagcacgcccccgcatacaacctgccaggatatgagtgacggccagcccgcaatggctgaaacaagcgcggcccctccgtatccaataccaatcccgaccagaccgccaatcagcgtcaatacgactgattcaattaaaaactgagtcagaatctgtcccctcgtcgcaccaagtgattttctgattccgatttcccgcgtccgttctgtgactgatacgagcataatattcatgacaccgattccgccgaccaaaagggaaatacctgcaattgagccgataatcgtcgtcataattgcagttactttgccaattccggccgcaatctcttccatgttcatcacttgatacgaatcctctgtgccatgattgtcatttaccagctgtgccgcttcttttccagccgattttatgtcgtctgctgattcgacctgcaatgatacgttactgaaatcacttgtgccaaaagaggatttcatcatattaaatggcacatacatttcacttaaatcgaaagaaagcaagcctgttacttttttcagcacgccgataatttcaacgggctgtccgttaatccagacaacttcacctagaggggaggttttatcaaacagctctttagccattttttgagagatgattccgactctattccccgcgagaaagtcattgtcggtaaaggttctgccgctttcgattttcaaagaattgacattcatgtatccatcatttattccgttaaccgtagcatcggtttcttcttcgtgataacgcgctttcatactttcagaagtcgaagcaacgacttgtttaatgccttctattccttttaaacctttaatatcgttttctgtaaacgtagattcagctgcggcattcgggttgcttgcaagctcctcgtcgctaggcatatagtacagctccacagtatttcccgggccgctgatcgactgcttcagcatttgctcgccgccctgtcctaccgcaacgacaacaatgacagagcctacaccaatgataatgccgagcatcgttaagatcgaacgcattttatgggcaaggacagagcttagagccattctgatgttttccaacaggctcattctcccacactcctttgtccggagctggcaggaacaatgtttccgtcacgcaccatgacgatccgattcgtgcaatctgctacttcaggctcgtgagtaaccagaacgattgtcgttccctcggcatttaatgctgtaaactgatccataatcgcctcgcttgttttcgtatccagcgcgccggtcggttcatcagctaaaatcaatttcggctcattcacgatcgccctcgcaatcgccacccgctgcttctgcccgcccgacagctcgttgggcatgtggagcattcgatcggctaacccgaccttttccaatgctctctcagcccgctcttgacgttcctttttgcctatcccggaataaatcatcggcagctcgacatttttttttgcgttcagccgcggaagaagctgaaattgctgaaatacaaaaccgatggaccggttacggactgccgccagttctttatctttatatgaagaaatgtcttcgccgtccaattgatatgtaccggaagtcggccgatcaagacagccgataatattcatgatcgtcgattttcctgatcctgacggccccataatcgagacatattcaccttgatgaatgtccaaatcaatagaatggagaacatcaaacgtttcctttccgatctggtagctttttcgcacattagaaagctgaatcatttaggatttcacttccattccgtcagtcacctgatcagatggattcaaaatgacttgatcatcttgggtaagcccctctttaatttctgtcaggtcatctgtcacttcgccgattttgacatcaactcgctttgcttttccgtcttttactgtatacacataatattggtcatcttcttttttgactgcctttgaaggaagcgtatttgctttccgtttatctgtttcaatattcatgataaatttaaagcctggctttccttctggaagatttccttttattttcacttgaagcgggtattggaccgcctgttctgttccttgtgccgcagcgctctcctgctgatccggaacaagcccgactgcggaaaccgtgcctttccatgttttaccctgtattacatctgaagtgagtgtgaccttctggccttttttgactttcaatgtatcgtattcagacaatttccctgagacgacaaggtcttttgggttgccgatatgtatgacaggctcttgaatatctgactttttggatgccgcttcttggttgacagaaataacggtgccttcaatttcgcttttcacttctaaatctgacacccggttggcaagtgactgccgctgaagctcggtttgttttaattcgatctccgctgtttttttctgcatttgaagctctgtccgttcagattcgatttgtttttctgcttctttctttcctacctgtttttccagttctctttctttgctgtccaaggcttttaacttttcttgaatttggtcaatttgaagccggttggattcagacgttaactggttctgttctttttccaggctcagctgctcatttgtataggtgactaaagccgtgccctttttaactttatcgccttcctttactttaatgtcttctaatgtccctttatccgcttcataaaagacatactgttcatttgaaaattttagcgtgccaggaaccataaccgttgatgagatttcattttcttcaacgctccccgtctgtacctccttgccggcgctgccgcttgtcggagcggcagaccggtatatattgattccaacaaaaagagcgactataactgcgattccaattccgatccagacttttttcatgagcttatgcacccgccacagaattgattaaacctgaaaaaagcgaaaatacaactaaaattccgaatagaatgattgctgaaatccacccggctttttttgagatgcctcccgttttgtgaagtccgattgctaataatacaaagctccagatgctgaaaatttcaaaggtatttaacacactggcgagagccccgtcagatgggataatccctgcgagtgacgtcgtgctgtaaagaggattcacgtcagtcgtaaaagcaacgattccattaaccaataatccgagactgctaatcaaagagacaaacagactgagagaaagcatttttttatatgtcgtaacaccgcctgatacttttacacagagccaataaataagaggggcaataaataatgctgcgataccgccgataatagcgcctgccattccgccaaatttggttattgttgcgacagtttccatttgttcagcagatagcccttgcgtatcctggcttttcaaaagctcactataatccgtaccgagtgattgcagcacggcaccgacgatgataattgctgcaacaatcaaaagcggtccccatacagccggcctttctcttattctttcaaattgaacggacggacttgtgattactccgaaaagtgaaggcttttcagtcgccgttccgctgtttttttctacattcgtttccatttcaaaacctccttgagaatatctaacaaatagtacgggaaggatatcaaaaagtttcatgtttttctaataaatttccaaaaaccttcaatattgaaggcttttcatattattctatcgctgtgctgtattgcgctttcacaagcccggcataaatgcctcctttagcgagcagctgatcatggttcccttcttctattttcctgccgtgatcaagaacaatgatgcggtcggcgtcgcggatcgtagacaatctgtgagcgatcatcactgctgtacgccctttcagaagcgtttttaacgcttgctgaatttttacttctgtctctgtatcaatgcttgccgttgcttcgtcaaggatgataatagccggatcggcgagcaatgctcttgcaaatgaaatgagctggcgctgaccggcagacagtacgctgcccctttcctctacctctgttgcgtatccttccgctaaatcggaaataaactcatccgctccgaccgcttgggacgctttcatcacctcttcatccgaagcatttggccttccaaaacgaatattttccatgatggtcccggagaaaataaatgtatcttgcaggacaatgctgatttgagagcgcagactggcaagggaaagatccttaatcggtataccgtctattttaatggtgcctccggccgcatcataaaaacggctgattaaattggcaatcgtcgtcttcccgctccctgtatgcccgacaagcgcaagcgtcgatcccgcaggaatagagaaagaaacggcgtgaagggcttttcgtttttcatcatacgaaaattcaacctcttcaaaactgatctccccatttatcttttcattatgaatggcattcggcttctccttgacatttggctgttcgtccagaaactcaaaaatccgttctgatgatgccatccccattaacagctgattatagacctgacccagtctcgaaataggttcccaaaacattcccagatagaaagcaaaagaaacgaagacgccaatcgtaatggtttcattcatgatgagtgtggctccataccaaatcaagacagccgtcccaatcgcattcgtcatttctacaagcggacggaacatggcattttttctagttgcttcccgccatgattcgtagttctcctgattgacaccgtcaaaatacgccatgttttcttcttcctgcgtaaatgcctgcgtgacccggatgccctgaatgctttcgtttagatgagagttgagcttcgattgcttcagccgtaccgtttgccaggatcggcgtattttttttctgagacttgttgaaataaaaaacataatcggcaatgtcaccatgatggctatagtcagctcagggctcagcgtaaacaaaataataatcacgccggccagaagcagcaagtcggtcaacaaattgatgactccgcttgtaaagagctcctgaagagagttaatatcattcatgatcctgactaagatcgatcccgccgaccgctgatcaaaaaatcgatgggataagcgctgcacatgggtaaataaatgctgtcgcaaatcgtaaatgacatgctggccaagctgattcatccacctgattcttaacacattggcggcgtaattgaggacatataaaccgctaataataaaaatgagctgaatcagcagctccgagtttctccctgtaatcgcttgatcaagaacataaacgccgatcaaaatggggatcacaagcttcacagcagtgccaatcaatacagtgagaaaagaaagcggcaaaattgtttttcgatatggtttgacatagctcagcagccgccacatttgagcccagttaaacggcttttcaatgatttcatctgaagagtaatagaaacgctctaaaaccccctgttttttcgcttgtttcatttggcccctccctatccgacctcatgcggctcattaatcattttgacatcacggtattgcaaatcgtaaatctttttatagtagccgcctttttcaagaagctcatgatgtgttcccctttcacgaatgcgtcctttattaaaaacgagaatttcatcagcgtgtttcagtgaagaaatgcggtgagcgacgataaaggttgtgcggtttttcatgacttcttttaaggcaagctgtatgctgtgctccgtttgcatatctactgcgcttgtggcatcatccaatattaaaatgctcgggttcaagcagatggctctcgcaatggcaatacgctgtttctgcccgccggaaagccccattcccctctctcccagcatggtgtcatacccatcaggaagctccataataaagttatgagcctgcgccctttttgccgcttcgatgacgtcttccattgaggcatccggccgcccatacgaaatatttgatctaatcgtagatgaaaacaggaaggattcttgaagtacgaccccgatattggagcgaagggtttttaacgaataatctgtgatgggtttgtgatcaatggtaatcattccgccaacaggactgtaaaatctggtgagaagctgtgtcactgagcttttgcctgaacctgtcgggcccaacagtccgattaccttcccgctgtttgcctcaaagcttacattgcacagcgcgtttgtttgttcttttccgtatgcaagagaaacatttttgaaatggacatctccggttaatttttgtttatgcaaagcatgaggatgatctgtaatgtcttcttctttttccagaatgtcgagcaggcgttcccctgacgcttttgcttgagagaacatattgatgacaaaacctaagttcataatgggccacatcatataattgacaaggctgaagaaagcaacaagctcgccgggattgagctgattttgcataaccaagtaaccgccgtatgagagaagagctacaatacaagtgttaccaatgaactccattaaagggaaatacgcagaccaaatggatgatgtttgtaaatactgcgccctgtattctgcattggctttattgaaagtgctgatctgaaaatcttccctggaaagagatttaaccgtattaatgccgctgatattttcctgaacttttgtattgagtttcgcaaacgatttgcggatgcctctgaaggcgggatggactcttttgtcaaaccggtataccgcaaccgcgagaaatggcagaacagctattgtcacaagcgtgagaggaacagaatagtaaaacataaccgacaggctgatggctaccagcaggccgaagcgaatgagctcagcgagaccgtatgataagaaaaaacgaagcccttcaacatcagcagtcagcctggacatcaaatctcctgttttcgcgttatcatagtaagaaaaagaaagccgctgcagtttttcatacagaccatttctcagccgataaacggatttgatcccgaacatatcacctaaatactgatgaaaaaaggtagccattcctttcaaaaccatcaccgcaataaatcctaagctgacccacgccgcaagctgatactgccgtcccagtacgatctcatcaatcgtaatttgcaggataatcggataaacgacagtaattgcagtcatcaaaagcatggctagaagcgaccacataaacacttttctgtacggccaataatacatttttaatcttttaaatgtctccatatccagcacctttccaacatttatcatcttcactatatcgatacccgaaataaatttctattatttttcaaaatttcagtctaattatggagtgagtctcttactttatagggagtaacatatgtagaataaacgcttacagaaaatcattgtatgctgaggatacttggggatatgccaatgaaatacagaaaaaccggacggctgaaatgccgtccggttttcatcccccgctgaccggcggtatgatggctaccgtgtcacccgaagatacagaggtattttcttttacatagctttcgttaacggcaatcatagccgtatcaatagattcaagaccgtattgttcttttagactcgcttttatttcatctgtggttgcttgttccatatctatttctattgcttgtgtaccggcctgttcagcaagccctgcaaataaaagaattttaatcatgctgctctccctcgcttaggtctggttttccgttcggataagctgtcgtttctagctggtcgccgatccattgctcaccgtcttcccaaatttcttttttccaaatcggcacaatctgtttaatgcgttcaatcgcatactcattggcttcatatgcggcttttcgatggggagaagatacagcaatcactaccgctgcttcaccgatatcgagcacacctatacggtgcgtgatcgcagctgaggcaccttcccatttttcttcgatttcagcgccgatttgagcaagcatttgcacggccatcggttcatatgcctcatattcaagccgaaccgttctttttccgtttgtccattcccgaaccgtaccaataaatgttgtaatggctcccgcttcccgtttctccacttttttgatgatgttttcagtattaatgggtgttttcgtaatctcaaaccgttccattatgcagattcccccttcagctgtgaaagcacaaaatccacggcaaccggatcatccgcatgaaaaacgggtaatccctgatgctctgtcatatgctctttttttctatagatgatggcgattatatttactgcttgcagcgcttccagatcttccttttcacttaggataaccactttaggataaggggcttttttaaagccttcaatcagaagacagtctgtttcgagaaattggtataactcaatcagccgtgccaaatcccaattgcggcgggcagtcagctgtaacacaccagcaccttctaccgctgttacatcagcacctgccgccttgtaacggtccgtgtcttttccttccgtgagcgtttgcggttcaccgccgtgaccatggtgcttcaggcagcccaaatggactccctgttcagaggctttttcaagaatgcgctcaataaacgttgttttcccgctgttttgaaatcctacaacttggacgatcgggaaaggacggaccaaggccattcacttccattctcttctctgatgagcagcacttgaaccgttctgccagattcgtagcctcgcgtaccgcccggcaggataataaatgcattggcatctgcaagtgatgtgacagagctcgacttatctaagccaacgggtgtcgccaacagcttcccttcctgatggtgcacgagcgcacgaacaaatcgggtaaatgggttcggcttcggaaaatccttggtcaaaacagcttccgcacaaattgaatgcggtgtttcattgagcagccatgtctggattatcggtttgacaaacagttcaaaaccgacatagcatgccgacggattacctgaaaggccaaacagcagcatatcgtttgcatgcgccaccgttgtcacgctgcccgggcgcatggcaactttattaaacagcacgtccgctccgagtttttcatagatcgcaggcaaaaagtcaaagtcaccgactgacacaccgccagttgtgatcaggaagtccacctttttcatcgcttctttaactgcagcaaagcttttatccagttcatcagagattttccctaaataaagcggtgttgcgcctgcttctatcgcttgcgcatataccatactcgcattgctgttgcggatttttcccggttccagcggatcactgacattcagcaattcggtaccggttgcgataatcccgactacaggctttctcacgacaggcacagatgcgtatccgaatgttgccaaaagagccgtcactcctggtgtcacccgggtgccctttgtcagtaaaacactccctttttgagcgtcctcacctgtttttgaaatattatcccccgtctgaaagcggcgttttaaagacataaatgacttcccattctcctcaaaggcttgagtcagttcaatcatgacgactgcatctgccccttcagggatttgcgcgccagtcataatccgcacggcctgaaacgggccaagttctttttcagatactgctcccgctccaatatggtcaataacttcaaaccgaactgggttttcacgtgaagcttctgccgtatcgcacgctctgacagcaaaaccatcgtatggcgaacggtcaaacgcaggtacgtggtgatccgcagttatatcttcggctaaaaaccgatgaaggctgtcttcaagcgccacccattctgtttcaccttgtttttgaaaatggcagacacgccgaactgcctcgtctaccggtatcggtgttcttttctccagcattctgacccctcctgttgttacagtccaatcactcttgccaacacggagttggcttctttcacatcatttgttccatgcaccagtgcccgtccgtcattgaaaatgacaattctgaaatcctcgtaaaaaatatgcagcaaaaacgcattagcctcgaccttgccgattgttttcagccgcttaatgagctcctgtttcgggattctttttaatgattctgaccttacctgcactgtatcacggccgcatagtacagcagcttttggtgtgttccaatcctgaagataaggatataccgcattagctccgcaagatgggcattcctcacggcgtacatgattaacgttaatcttcatatgcgaattgttccagacatcaaatgtcacaaacccccgctgtattgcttctttttggccggttaacagctttaatgcctcagcctgctgatatgctgaaacgatatgcacagcaggcggaataatgccggcagtatcacacgtcgccccgccgacaggaatttgctcaaacaaacaagacagacaaggggtttctccgggaatgacagtcatgaacattccctggctgcttacacaggcgccatagacccaaggtgtctttgttttctgggcaagatcgtttatcagcatgcgggtttcaaaattatctgtcgcgtcgatcacgacatctgctttttcaatcagcggctcaagcgtttcggctgttccttcggtaacatacgcctcaatatgtatctcgctgttaatcgctgatagatgctctttggcagccatggctttcggcatgcggagtttggcatcgctttctgtataaagctgctgcctttgaagattgctccactccacatagtcacggtcaataatggtaatcgtaccgactcccgctctcgaaagcccttcagctcctgcagtgccgagcgctcccgctccgacaatcagcacatggctgtctgccagtcttttctggccctcttccccaatttgcttaaatctgatttgccgtgaataacgttcctccatcaaacctgttctccttatcttttatgtcatcttatcatgttattgccccgtcagtcccgcttgagggagttcgatttttcttccaaacagctaaaatcatcacgtgtattaatgttgataaactctgccgggtttgctccgatattttcagcctgtacgtaacaaaccgaaattctgcctaataaatctgatattctcaacctcttctcagaaagctgatcgtatagaactggcatgatacgtttgtggtaaatcgcaatcaatggctgcacttgtccgtctgaaattgggactaccgcgtccgcaccggcaatcatcagacgtttgagctccagcatcgtccttctttgtatcagcggtgtgtcacaggaaagaacagtataaagatcaccgtctgtctttttaaaagcggtatatataccagccaatggccccatgccttgaaatggctcagcatcttgatacacttcattttcaccgttttcttgaaatctatcaataaattcgggacggctgatgataaccgtttgttctccaagtgcctctttagcgcattcgtaaagcatcctgcccttccatttgacaaacgccttcggttctccaaagcgacgtgaggctccccctgccagcagtacgtttacatgcttcatatcatctcacctctagtttcgttaaaagcatagcaaaagcaaaggctcaacgctactgcttgtctgtttattaaagaggaatagctgttcagtatttgcatattgtagtgttaacatcatgagggagatggttcgaatgaaaagatcaggtccttttttccacgacgtgtctcaggagaacctttatttaaaatccgagctttcaaggtgccataagctgatttctgaacttgaagcaagctactttcatcagaaaaataacaaactgctcaaagaaaataccgatatgaaagaaaaactccagcagctgtctgccgaattaacacatatgtcaacaaaagaaaaacatgcctcccacaccagccaaaccctgcaccaaataagagctgaactgcttgataaaatcgttgttttgcaggagcttctatctgctgaaacctataaacgcagagccgaaatcgaagaaaaacataaacttcatattgcgaaagtcaaaatcgaagaagaaaataaaaatcttcataaacggatcagcgaacttcaagcctcaattgagcaggaacaaaatgcactgcttcaggcaaaacagcaagccgaattgataaaagccgaaaacgggcgtctaaaagagcaaatggtagaaaaagaatatcagctaaaacatattaaaatagaagttgatcatatgaaagatcgaatcatagaaacgaaagaaagactgctagacatagaaaaaacgaaagaaaaattatttcacgaaactattatatcgtataaacggcaacttgatgaaagcgatgcctggattgcttctcattttgccgatattgatggcggcacgaaacaaaaagaaaaaacggaagaagaagctccagcggcctacgcgcagccaaatcatgtagagactatccttgaagatgtcaccaaacagatacatgtgcttcaaaaacagcttgcccacgcccaatcatcagaccaggccaagagccatacaatcgaagagctgaaaaacagagccgctgaagaaaagccttatcaaaagtgggtgtataagcttaatcttgaaaaagaaaacaaaccttcacagaaaaaacctcaataaaaaaactgcttgagcgatgccaagcagtttttctttatatttattcgtttgctgattctgcagattcgatttcaccctctaaaatgtactgcccgcgatatggctttttcacttccgggtacattttaattaagctttgcataaacgttgtcatattagggatttcaagaccgctttctttttcaatctctttttgaagctccgagctcttaatcgccgcgttgtggcgttttaatgttttaatagcagcttcacgcagcttagctgcttttgatcccggtcttgccgttcctcttcttcttcgtgttgttccgtctggtataccggcaggaagagaggaaatagattgaagctgaggctgaacagactgctgctgtgattgcggctgatagcttctgatttcctgagccgcaagctcagcgagaaccggcagagagtcaggttttttttcagaacggaaatcctttttgatttcggaagggcttccatttctgtccagctctcttaattttgcgtatattttatcacgttcaatttgatattcacgaatgactttcacttcagcttcatttaattgttctaaccgcaagcgcaaagcttctctttcattaaacattcctcaatgtaccccctatcaaaattaacatctttaattaagatattagattacaaaagtaattttatcaactattattttagcattttactattatatttactctatgaaaaattccttattttctgaaaatgttttatttttcaaaagagtcctttattctcaagggattaaggggctttctagtttatttggtataatgttgaaaatatatattttacttacttctttaaagaaatttagtgtaatatctacaattttcgagttatgagatatgagatttatctaaaattgaggaaaaacatcaaaaattagctgtgttttttagcgtatcaatcaaacaaatcatcaattcctatacccaaatttggaaaaataagcttcttactcttcttccattgctttttgcacaaataaaaaacctgatgaggtcaggtttttaggaaatactatttagtcagatacctattccgtttcagccagaacgcggttcacacgtttttcaagcattttcataccgctcccgccggcttggaagtgacggagctgtcctgttttatcaaacacataatatgcaggtacatattcattttcaaatgcatcggttaaagcatggtcactgtcaacaaaaatcggctgagtgatatcgtgttcagcagctgtttctttaattttaccagggtcaagatcatcttcggaacggggcatgtgtacagctacaacattcagctgatcttgatatttatcacgaaattcattcacttgcggcatcgcttctttgcacaagtggcagctgatggaccagaaatgaataagcgtcggcttttccccaatcaattgctctctcgtcacttcaccatttaaccaagctttttctcccgtcaattccggcatgggctgacgtaatttcattgctttttccctcctattttaaaagagaggcctaacgaatatgctagaccgcttttcgttcttggaaagaattaaagtgttttttggcctggtttccagttagccggacagagtccgccagtttgcagcgcctggagaacacgaagcgtttcatcaacatcacgcccaatgttgttatggaaaacagtttgatattgaagctccccttcaggattaataataaacaatccgcgcaaagccacaccttcttcttcgattaaaacgccatattcccgggatacctcatggtttgtatcagcagcaagcgggtatttcagctggccaagaccgttttctttgcggtctgtattgatccaagctaaatgagtatggatggtatcagttgaaaccccgatgacttctgcatcaagatcttcgaactcgtcatagcggtcagacattgctgtaatttctgtcggacaaacaaaagtgaagtccattggatagaagaacagcactgtccatttgtcgtttttcatgttttcctcaagacttactttgccgaattctttgcttgcaaggactgcttccatttcaaaacgaggagcttgtttacctaccatacgttctgccatatgtatccctccaatttattgtttggcttaaaggtcaaaatcgcatgaaaataaagggtgattaaccatttttagttatattgcaatgccattatataaaagcagatttcctgagtcaatttttaacaaatcatgtatgtctttggcttcgacatttttgaataaaacgtttaacatggtcatgtacagggtaactagtctcaatgtgcagcaatcaattagaaaaggagctcaacatggactttattaaacaatatgattgggcgggactgattacaaatgccggtgttctgctcattaaactcgccattatgatattgctctattttatcgttcgatcattaggcatgaaaatcattaaacatctgtttgcaaaattcgaggagcagaatagcttgtctatcggacgtgcacatacgctccgaagcctgactcttaacatatttgcttatacattgattttcatatttttcgtcatggttctagatttgtttcattatgatccaagcgctcttttagcgggggcaggaatcgtcggcctggctgtcggatttggcgcccaagggcttgtcagtgatatcgtgacaggtttttttattttgcttgagaaacaattggatgtcggagattatattaccgtttccacctttgacggaattgtcgagcaggttggcttaaggacaactcaaatccgcagctttgacggaacactgcattacatccccaacagaaacatcacaaacgtgagcaatcattctcgtggtaccatgcaggctcttgttgacattaaagtgccggctgaaagaaatattgatgaaatgattcatattttacagcaggtttgtgatgaaacggcagcggctcttccacaaataaaagaaggcccaaatgtcatcgggattcaagaactggggacttctgaaattgtaatcagggtcattgccaaaacagaaaatatggaacagtggcgagtcgaacgagtgttgagaaaagaaataaagaacgcgttcgaccgcgctttccctaaagaaacagaataaataaaagaaccgaagctttttgcttcggtttttttattactgaattctgctctcaacttcgctacaaatttcttcagccgtcatcccggaagctgtaatgacaggtgcttgtgttaccgtatcggctatcccttgcacattattatcaagacctgttacgacacagcagtcacagccttgagcatcagcagggcttttcatcattacaacgtcatatcctttttcttttaaagcagcttctacatctgataacgattgttcaattccaatttttttagccatttttgaacacctccgtttactagagtgctcattttatggaattttattctttcatttgtacttaattggcataaacagaaaaataacctgtcatgacatgaaccgctgtttctatcgcattttcatcgggattcagcttagcatgatgaagcccatgttcagaatcagcgccgagccagaacatgaatccgggatattttttcagcatatagccaaaatcctctccagtcattgcttcttttgcttcaattactgtcgccagttgatgttcagcaacaaaagacataaattcttctgttaatccgctcgtattgtaaacttggtgatatacagacggatatgtcacttttcctttgcagcggaatccgatttcgattcctttcactacatcttcaatccgttcctttacttgtttcatcgattcttcagaaagcgtgcggatcgtgccttccaggtgggccgtttctgcaatgatattttgtgccgagcctccggtaatggtaccaactgtaataacagcactgtctagcggatctgtgtttctagagataatcgtttgcagctgggtgacaagtgtacttgctgctacaaccatatcctcagccaaatgcggatatgccgcatgtccccctttgccttccagatcgatgactagctctgatgtattcgcaaatagaaggccgctttttgtcgcaatggtgcctaccggaagctctggagcaatatgaagggcagtgatgaaatcaggctgccatttttttaatacatcgctctcaagcattggttccgcaccgccaggcccttcctctgccggctgaaacagaaaaagcaaatcatgtttgactgggtggtgaacaaaatgatcaataatgccgagtgcaattgtcatatgcaaatcgtgaccgcaggcgtgcatgttgccgtgatgctctgatgcgaatggaagaccagtttgctcttctatagaaagcgcatcgatatccgctctgtatgccagcattttttccggcgccgtcccgttcacttttacaaaaagccctgttcgccatttctcaatttcaattctgtcttgcggatattgttccaagacatttaataaatactgctgggttttgaactcctgaaatccaagctccggtatacgatgcagatctctgcgaattgcgatgagctcctctatcttcatttctattcctcctgcctatacgaataaggcgtggatatattatccacgccttttttatcaaacttttccttacagctggcgtaattcctgcttgatttcagttttgccttttgttttttcatcaatgtctttgatttttttagctggtgtgcctgcaacgacagtgtatggctcaacgtcgtttaccacgatcgctcccgcagcaacaacagctcctttacctactgttacaccttcaagcacaacagcatttgcgccgattacgacgtcgtcttcaatcacaaccggtttagcggatggcggctcaataacgcccgcaagtacagaacccgcgccgatatggcagttttttccaacagtagctcgtccgccaagcacaacgttcatatcaatcattgtgccttcgccgatgactgaaccgatattaatagaagcacccatcatgatgactgcgttatcaccgatttcaacttggtcgcggatgatcgcacccggctcgatacgcgctttgatgtttttaagatcaagcattgggatcgcagaattgcggcggtcattttcaaccacatagtcttcgattttgctttggttttcttcgattgctgtttggatttcgctccattcaccgaaaacgacaccagtgtttccattgataaaagctttcgcagattcaccgaaattgattccttccagctcacctttcacgtaaacctttacaggtgtagattttgtactattttgaataaatgaaataatttcatttgcgtccatcattttcatatgtatagtcctcctcctgattttctacctcattactgtatcaaaggaaagatacaaagacaagaaaaaaaggaacagccgttttagcagttcccagtgagtgatcagacagcgcacccgcttttctttgcgaattgtctcccgaagtttattaattcttcctcttcttcaccttctggattattttcgatttttaccgaaggcagcacaatgtctccaccgcgttcttttatttttgcctctagcgtatcaaccgctccgcagaaaaattcatatgctgtatcaccggaaccgaatacagcgcatgttttgccggaaaaatcaatctcctccatgtcttcaacaagatctaaaaattcatcaggcagatctccgtctccccacgtgtaggttcccattatgacatggtcataatcggtaaacagctgggcatcatcaatatccattgcttcgaaacggtctacttctgctaacgcctcctgaagccccttttcaatcaaatctgccatagcttcagtgttgcctgacattgttgcataaacgagcaaaatcttcgccaattccttgttcctcctctaatgaatcattgctgaaacttcgtacggctggacaaatttacattcatacaagcctgcgcaaaagaaattctctttctgattggccactctccatccatgtcccttaatggtatcgaaccattttaacgaccgggcttcgagatcaacctggtaaattctcgaaaaaccattttcatcttgtgttgtagtgacatatataatgccatcatcctctgaaagatcaagaaatgattcttcatttctgatcatactggattgtatggtgaattcttcaccattcaaaagattccttacagtgacagcaccgtgctttcctttcacagaacccatcgccgccaccagccaattttcattgaacacgagcatggatgccgtcatccggtttttttcttttttgacaacttggacagtgtcacgcttaatgtcgtaagcccaaatgccgccaaaatattcgtgtatttgcgtgccgataaagagattgcccccgtgaaggcataacgaccggataacagggggattatgaaattcggcaaaaggtttggctacgcgccatgagacaccaaaatcatccgatacataaatacaatgcttaccgtgggcgcagacaaacccgttgtttctgccggtaatcgcccacactgttgcatttgtcggaaagctcgacatcgtccaggttttcccttcatcagccgaacgaatgactgttcccttttcaccaacgccaaataagtaaggccctatgtagctgatacagtgtatcttacttttcaaacgaaaaagctttctccagccctgctccaaagagtaatgaaaaatgccttctctttgtaccgccacaaaatatccagaaaacgccgatgccgtaacagcggttgcccctttatgaaacatggattttttccttgttcatataatctgcccatgcaagaaaacctctcgcaaacgctcggcagctttccacatcttcatctgtttcaggcgctaattcaatttttagtgtttcctggtaaacagcagctcccgcctcttgcagcatgacattgaacaaattcaccgcttcgcaaaactttggataagaataatcgccagacccgaagcaggctgtttttaaaccattaagctgaatctgtttgacctcttcgaaaaaatcctccgcttcgtagggcaaatcgccgtccccccatgtataggtgccaatcagtacataatcataggaggttaaacaagacgcatccatatcatttatctcgacacaatcgatatccaactcatattcctgaagcgtatcttttattatgaaggcaatgtcttctgtatttcctgacatgctggcatatgtaatcaaggctttagccatgttatcaccccattagttgataatgattttcaatatcatatgtatcactttaaatgataatgattttcattgtcaacagataaataaaaaaaagacagcacctcgctgtctttaaaatggattttcctgatccagcatatcctttatcacttgtacaaaagcttgaacttgtttcagttcaaaggcaggctcataacctaataaccatgtatcccgaccgatcggatgccctttcatgtctaaaagaggcattttattcactttatcttcattttgaagggtaacagacggcaaaatggcataaccgattccgtgcagcgccatctgtttgcacgtttcaatctgatcaaccaatatcgtctgtttcggcgacgttttaaatttttgatgccaccagtgctgaatttcctgaaaataagtgctgtcacttttaaactggataaacggacgttctgtatgggcaatatcttcgatgcaggaaatttcagtatccactaaatacagatgatctgtcattaagtaatctttgcgccccttccactcagggttgcctcttataatgccgatatgaacctgatcctcatacaagcttttcagcatttcgctgctccacccggttatgagcgagatctttgcattcggatacttttccacatacgtcttcaggactttagggagccaatgctgaccgattatggaggcgacggcaagcttcaatgtgccgtgaatttcaccttcaagctcgtcaatattttctcttattctttcctgctctaatgtcacatcattcgcaaactgaatgattttctcaccggcgggcgttaccgttaatcctttttgagatcttaaaaagatttttgttccccacgccttttcaatggtttgtaagcgctgagataaagccggctgagatacaaaaagccgttctgccgcctttctcatatttaattcctcagctaaaactacgagcatatgaagctcttgaagctgcatgtcgtcctcctttttgttatcaataagtttttcttatctcccattctaataaaatcttagtttcttattcaagccctattctcgtttaaattatgtatgcgctttcttttttcactctgcctatataataaaaataggaccgtacagcctacttattcaatgagcgtatatgcttattcaattcctttaaaacgactcttctcgtaaaaatcccttcaaatacctgctcgtcattttcaacacagacaaatccgttattaatgaccatgccgaatcccttcataatcggatcattgatatgaaggcgcggaatgtcggtcagcatgacttcctcaacagtgatttggtcaagcttttcaaactcaattcgctcaagtccaaaaatactgttcatgatcatatttgtcccgattaagccatgtaaacggtaggaaggatccagaaccgggatggctgtgtatccggtttttgtcaatactaataatgcatgctcaaggttatttccgacttgcacgtgcgctactttgtccgcctcaatcataaattgtccgactgttgcctcaagaagttgatctgattgtaagcttatcatgttttcgaccccttttcattttcatcatcaatacattccctatattgcaataatataaactttatcagtatttgtcgaaaagtttcctttcaataaaaaagatactctttgtggagtatcaattatagggtgtcccattaattttcaaatcgaaatcggtcgtatagcgttacaagttttttgtaggtggttccgtcaacgtttttggtccctgtctctatatcgttgatctcactgcttaatagctcgatggcatactcatggttgatcaggatattcagcagaagtttttgttcttcttctgtaaatcgttcaccgataagactcattcgcaatcaggccccctgttttatactgaatacctctgaaagcaagacaacttactttcagctctaccgctagaataagtaatcagataacaaacgtcaaccgcataattcgacatttaccttggctttttcagccaaattattttgtgaaacgatttgcatagctgaaggcagtgtatgaatccggctttattttggcctcaatccccatggaggtaatacgtccagtcatttcttggatcagatcttttgtaagcccttttttcccaatatccaagtgaacttcaaaggtaagatccgccccctcaccggtaaagggcaggagcagatcggtaatatccattaagtgtccatcaagaatatgagcggccgtttcttggctgtacgccgtttctaacgaaatcttctcccgaaggctatgtatgggtctgtcgactgtatgatttttcaagcagccccaagctcccttgcctgtacgatgcaaatgcaatgcggtaataaactttgtgtaatcgcggtaaacctgtgaatcggttccgatcgataacacataagaagaacgggggtccttttgaacaaaggctttaagccgttccatcacatcttgaaaggtcatctgtgcttctgaaagattataaaacagaaaagaatcagccatcacgacactccttttcaaggatttacaaccatgaaacaagtatgttccttaccgtttatttcgattacttttgcaaaggcggaagcttgttccccctatttcaggaatcttactgaagaagttcaaagatttcgatggaaaccatgtcgatattatcaaacggatatgtgttaggtttttcacccttttggaaaaccgtcagttcaaacgtttgatttttttcgaaatatttaacactgcatattttctcaccattcacttcgaaataacgctgcattggctcgttagccgcttccgctgtttcttgcagactttgcagccgtgtgatgatacccattaattgtgacattctaaaaaaagactcctttcaaaaagcaacttcaaatcaacaagtatttattataatacaagttctattgagcatcataccataaagtcggacaggatggcattttcactgctgaatttaagcaaagaaaaaaagtgaaaaaaactatttttctttagtttgaggctttttttgaatgtcatgcacataattataatttttttcgaatctttggcagcattaagaatgcctttttgcaactttgtcaaaaccttcttttgaattttatggtgaagtcccgcgtggccataatcaatgggagtcatgctggatagaggtaaacaacggaactgaaataatcatttcagaacgaattttcctcctcacccgtgcagcagtgtcaggggtgttcggcactcaatgtttctccccgtgttaaacgtttaccactagttaggtttattgtttcattggattgtcctatgctttgacaaataaaaaacttggcgggggtagcgccaagttttttcggatcttgatctgatagaggggttggggaacagagagtagcttctctctataattaaatgataatgattctcagtatcaatgtcaatcgttttttgatatttttttcatttcataaaaaaaacggcctttcagccgttaaatcagtccgtcctgctcatataaataagaataaggcaagtctataaataaatacatctgatcatccatcggatatgaaaacgttctgatcatttcacctgtttccaaatcactgtacagatcactgaaaaaaccttttctgagatttctcattctcataatgttctccagaaaataagggcgccagctccagttcttttccgcatattccggctgataaatccattctccatcttgcttaaacacatttcccgtcagctgatcgccttcttcatcacacatgtaaatcctgaagctgcaatctgtcagctcttccgccagctttttaataaagtcatcatcagaagacagattgttttttctcaaagaggtcacagcctgatgcactcgtttgtaaaactgttcagagtgctcatagacggtctccagtttctttttctcatgtgtgataaattggtgaaattcagttttaagtctttgtttcaatacatctctctctagaaacgtttcagatggagacactaagtaatagccctgaaaatagcggcctccgtttctccaggcgtactgaagctggaagttcgcctcaatgtcttcatacagcagcgccgcaccgatttttcttgctaataaagatatgctgtacagcacatgctcatatgacggtgacggctgtgacactttcagcgcctgcaaatcgatttttaacagatctggtgagagcagcgcgattctgtccaagttgctgctttcttttccgatgttgtcaactgcgattttaattccgtatgtacgatagtatgcaagcatatggtagagctgctcaatatccccttcaaaattgtgctctgtaatttcaagcacaaaacggtggagttcgattcccttcgcttcatattctttcagaagctccagaaagctttcaccatgatccagcatcagcagattggcatcctgattcataaaaatcagcagatcagaatccgcctctaaaaagcggtcaagagcctggcggataattctgttatcaacctctaatttatattcttcgggtatccccgcatctaaaaagaagggcccgagactttggatttctgaatctgccaaaattcgtccaagcacctcatatccgacaaccttctgctcctcggcactaaaaatcgcctggtaatatggaaggacatcatcaatgttcgttaaaatatcaagtggatccaacatgttatcacctgcttctctatctttgtctgattatacgcacaattataactacaccacaaatttcaaaaaaatcatagtatggaaaagtaggtcgtatggagtatgttaaaagaagaggaaaatttttttgagattatcaatctacatactggttaattaagaattttattcatttgtttcacaataaccaaaacaaatacaaaaataacagcattataactagcagctgtccaaaagtaaagattccagtcagtgcctttatacatccaatcatcatcatgtttcatattatagaaagttccttttttatcgtaagtgccaaatgtaagagttgttaaaccggcgacactctttgaaacgtcaactccatacattgaaccgacattgtcagtatagtttattttcatatacgtgtaatcagataaaactttttctacccgcttggttggcagagacacatataatacagctgacgtatctcctccgggcccagccaaatactctctagctttaataaattttgtttcatcaggaaaatctatgtggtatagtttttcaaatcttattatttcattagaagtaagatttgtattttgataatactctggggaaaaagcacaaataataaagtaccaaacattaaagatgataactaaactgcttaaaaataatacaactaacttttttaacaatttcttcaatgaatcactccttaatctttaaaaattatatcataaatttaaatagaaaataaaacaagcgaacgaccagttttaacgttcgcttgttttgcagtttattcagatatcatttttttctcgataacatctctaaatgcttgtgctgttatttttccaatctcttcactataatcctcaacatcaaaagcacgtttaaaggctaacctaattggaacaacaactgggtcaaggtttgtatttaaataatactctgcttcagagaaaattttgtctaacgaaccatcaaatctattatttacaaattgagtgaacctattcatacagtcattattactataataatctctaattgcgatatttagaggttgtgcattagcaccaactgatgttttattcgctagattaattgcatctacatcactaaataaatcatctaggctaaattgatacatattacctattattttcatagccgcatcataaggcgaattaaattcttgagcgtgtaatttcatgtcctgtattgttgttaatagatctccagtccaaccagcaaaatctcgtagtgtttgagagtaaccaccactataaataatggcattataagttgccataagatgctgcgttcctatgacagtttttgatataggatcaacaattccatttactaggtcttcccctagcgctttactgcccattcacgataaataggatcaatctggcctgcggtagggacccacttccaccctttgtagtcatcctttcttaaatactgggcaaccaactcattagctaattgtgttttttttaccccattatttaagtcgctttgcatttgagcatatttttcagcagtttcatataaaacatcaatttgatcaaaaaacttcttattctctgaaggcactatatttatggtattaactccattatccaaacctgaacaaatatcattatcaatttcaatcattccagaaccatttccaacagtaattgttgaaatttggtcaaacgcccaattgtaaggcaaaggatatcctaagtttccgctaaagccagtagacataccacttacaaaacttgcaaatgctaaaccttttttagaaactatagtacatacattcctaggggcataaataccaattttgtaagttgaacctaaaaaaccgttcattatttcatttataccttcgaagtgtggaataatattgttgtttaaatcgttaccatatgcatcataatctactgcaaagtatattacagtgttatttttaaacccgtattcttttgctgctttataagcagcaaacgcatctttctttccttgttctttattaaaataatttgttgctcccccataggtttgataaatcggaaaaacatttaaacctgattttaagatagtttctaattcacctggttgtatttttttatttagtgtactccccggcgcatttgttagataccgccctacaatcttataacctgccctcttaagggactccgccctgtccgatgtaatttgagtaattgagtcacaagcaactccttttcgattggggtctccagtacttactagaagtgaagcccatgtttgaaagtcggcagtaccactctgttgtaattttgcaaaagactgaaaagcctttacttttgatcttacagattcagagtatactccatcaaaaggaacattgtagccattaaagattagagcagcttgaaataaatgaataaaactgtttttttcatctgtttctccaattcttaatacaggaatcaatctttgagtagttggtccaaaattcccattagctatactatcacttaacccttcctcgtactgtattgcataaacaagagacttttgagtatcccttgaatacaggccatcacagggcataaagtagaaattctctctattgtaatatttattatttagccattgctgtattgaacgaactttctctgacgccccatttaaaaggatataagagtccatgtttaataaagctttaaacaccttaggcgttactacaccgtctgttttagaaagccccatatgcaattgcatttctgctatcgcctctttcgttccctgaccaaatgtacccgttaatccacctggaccataacctttacaataaagagcaccttgaataattttcacaatatttttttttgaattagttgacgtagaaatcgggcctaattctttaagctttcttaaagttgtaggaccaaaactgtcggaagtctgtgtaattcccaattctagttgtaatgctctagttaatgcatacattgttttccagccagttttcccattttcctcaatggaattgtagccactttttcctttgtacgtttcattgagccattcctgagttaataataccatctcgtccattatattaccttcctcccaatctgatgtaaccttgaaacctttcattcttataatttctctttttagttaacgaagtaattatatgaatgttttatttgaaatctaagttcttcatatttcgtctccccttttaaaatatacctttcatatattaggtggcttacgtatgacacaacacctcataaacaaataaagctctatgtgttatcaaattggataggaagaaggttaattgtggaggtattacattcgaacataaaagttcttaataacttaaatattcacttataaatattcagattaaaacggataaggattcagccattgccccccgtccattgtgatacaatccccgtttatataggatgcttcatcagaaagcaaaaacgctgccaaagcggcgatttcctccggtgtgcccaatcggccgagcggcacactgttcatcgtgcgggccatcgctttttccgattcaaatagcttctccgcaccgcctgttcgttcaatcggtccgggggctatcgcgtttgtacgaatgccgtatttgctcccccattcaacggccagcgttcttgtcaatgacaatacccccgctttggctgcagcggaatgaacgacccccgctcccgctccccaagcgtacgtggctgccatatttaaaatgacaccctgctgcttctggtcaatccaatgccttgccgctgcttggctgcaaaaaaatgtgccgtttaaaacaatctcaataacggctttccatccattgggcgtcagcttttctgccggacaaataaagtttccggccgcgttgttaatcagcgcgtcaagccggccaaaggcttttaccgcttctttaatcatgtctgaagcggcggaatcggaacggacatccatttgaaaacaagcgacctgtccctcaaaggtctgaatttctttttttgtttcctcaagtgcctcatggttcctccctgtcaccataacgtgccaccctaattcagcctgtttttttgccatcgcttttcccatgccgcttgacccgccggtaataattaccgcctttttttccatgtttatccctccaattgtgaatgattattcattcaataatattctatcattatatccctgcctctgtcagcacatgctcatatgagatttttatcagatacagatgatataatagaaaaactctattaaaggttggtttgaaatgaaaaagatgtccagaagacaatttctaaaaggaatgttcggcgctcttgctgccggggctttaacggccggcgggggatatggctatgccaggtatctcgagccgcatatgatcgagacaaccgaacacacaataaaaagctctctcatcccgcacggatttgacggttttaaaatcgtgcagttcagcgatgcacacttgagtgattactttactctcgaagatttaaaaactgtcattcttacaattaatgaatctaaacctgatctcattgtttttacaggtgatattattgataatcctgatacgtaccagcaccaccaggcagtcattccattattgagaaagcttaatgctcccttcggcaagctttgtatttacggcaatcatgatcacggaggctatggaactgccgtttacaaaagcctgatgacggccggaggtttcacggtatatcgcaatggctatcaaacattgtcactcgcagatggcagcaaaatcgagattgcttcgcttgatgacttaatgctgggaaacccagattatgaaggcaccctttcaaggctgagcgacagacttttttccattcttctcgtccatgaacctgatgcagccttgaaaacaacagattatcccgtgaaccttcagctttccggccatacacacggcggccagattcagctgcctttttacggaccgattattacgcctccatatggaaaagtctacacagagggaatgtatcaaacgggcagcactcatatttacgtaaaccgaggcctcgggatgaccaggctgcctttgcggtttcttgccaagcctgaaatcactgtcttcaccttaaaaagcacaaattaatgtagcaggatgggctcctcatcaatacttataagtaaaaaaggaggatgaggaaactgcttacgtaccaggtgaagcaaggtgatacactgaacagcatcgcggctgatttcagaatcagcacggctgcattactccaggctaatccgtcactgcaggcagggctcaccgcgggacagtccatagtcatccccggactgccggacccttatacaattccgtatcatatcgcagtctcaatcggagcgaagacccttacgctgtccctaaataatcgggtaatgaaaacctatcccatcgccgttggtaaaatactaacgcaaacgcctactggcgagttttacattattaaccgccagcgcaatcccggcggcccatttggcgcttattggctgagcctttcaaagcagcactacggaatacatgggacgaataatcccgcttcgattggtaaggctgtttctaaaggctgcattcgcatgcataacaaagacgtgatcgaacttgcttcaattgtgccaaacggaacgagagtcacgattaaccggtaatgttttcttatttgtttcaaaaacaggcggtttataatatgataaagtgggacctttagggtaaggagcgtttttatggatatatttaaaaatcgtaattttgttcgtctatttttcgcagcactcgcttctcaaatgggcacgacagtaggcaacatggcctttgctttttttttgctggaccgattcagcagccagccttcatatacgaccttggcggagctgatgtattctcttccgaccatatttgtatttctgatcgtgggagtcgtcgcggaccggtttgatagaaaaaaggtggcagaaaattgtgattggatcagagcaggcctgactgtcgtgctttttttcactttatttaccggcaatattcctcttgttttttgtatcttatttatcagaagcgctgtaacaaagtttttctttccggcagaaaacagtttggtacaagccattctgccgaaggagcattatgcgaaagcggcagggcttaatcagatgctttttagcatttttatggtgtttggagtcggcataggcgcgtttatgtacaacacaatcggtattgaaggcgccattattcttgattttgtcagctttatcatttccgggctgctgatccgcagctgccggattccaaaagaagcccgacagccaaacggtgcattcagctggagaaagacttctgttaaggattcaataaatgactttagagaaggcatcctctatattttaaaaaacaaattgctggcatctcttatttttggcttcttcatttttggatttgtcaatggaggattcgccgtattgccgatgtttacaatgaaatatggattggcgcctgaccgttatgagtggcatacgtctgtatttacgatcgcactcgggtttgggcttctggcaggaagcgtaatcggcacgctcatctctaaaaaagtgaagccgcactttttaatgtcgataccgattttcattgcaggtttgctgatcttcgtcctcggctacaccaatattttatgggtgtattacgcggcagcttttgcactgggaatgtgtatcggaccgatcaacattgcaatcggagggtggatgccaaaaattgttcatccaaaactgatgggacgtgtaagcggcatgcaggacccttttatgatgtttgcacaatctttgacactcggcttagtcgcgctgttattccctaagtttgtttcaaacattgattatctttattacggcatgggtgttattatcctgctcgtttttattttttattttattgcactgccaaaatacagtgctcaggctgtggaagtgaatgttcaggaagcatttcaagaacagccgaaaaagaaggcaagatctgtataatgcaggttaaaaatgcgctttttttcttagaaaaaagcgcatttttacattcaatatttgcatttcaactttaaaaaagtataatctaaacatatagaaattgataagagcaaaggagagaaataatggacgaccatgcatatacgaaagatctgcagccaaccgtagaaaatctttcaaaagcagtttacactgtgaaccgccatgcaaaaaccgcccccaaccctaaatacctatatctgctgaaaaaacgggctttgcaaaagcttgtcaaagaaggtaaaggaaagaaaatagggcttcatttttcaaaaaatccaaggttcagccaacagcaatcggacgtgcttatctcaatcggagactactattttcacatgcctccaactaaagaagacttcgaacatcttccgcatttaggtacacttaatcaatcgtatcgaaatcctaaagctcaaatgtctttaacaaaagcgaaacacctattgcaagaatatgtcggcatgaaagaaaagccgctagtgccaaatcgccagcagccagcttaccataaaccggtctttaaaaaacttggcgagagttacttttaaaataaaaacagccgtgcctctttctggcaacggctgtttttatttattcaataacatacgtatccacttttttaatcaaatcactgatctcaggcttgctgatttgctcatctgcgcctacaacttcgccgcggtgacgcagatcatccgtaattaacgatgagaaaatcataaccggcacatctgagcttttcggattttccttcagcagctttgtgagcctgtgtccgtccatttttggcatttcaatatcagtgatgatcatatcaatctgttttgataaatcagtttcgttttcagcaaggttcataatgtattcatatgcctcttttccattttcaaacgaagcgatattgttgtaccctgcttcttttaattcatcctgcaagaggcgcatcaaaagcggtgagtcctctacaatgataagctttttatcagttcttctttcatcgaagccctcggtatgcatattatacgtgtcaacacctgaatctgattcaatgtcataaataattttttcatagtcaggcaaaaagatcatcaggtcttcgagcttaataataccggtaaggtgccgctccattccttgatttaacgatgtcggcttttcaatcgcttcccaggatactctgtgaatttgagaaacagagccgacatgaaaaacaattttccgtttattaaattcagtcacgatatatttctcatcttttgatccttcaggctctactccaaaaaatgagaagagactgatcacagggaggatttctcctctgagtttaatcattccttctacatgctgatgggagtgaggcactgatgtcacctcgacaggctgaataatttctcttaccttcatgacgttaattccgaaagcattttcacccacgccaaacttcacaatttctaattcatttgtaccagaatccaataaaatttcgtattgttgtaacgacaattcaatccctcgctattcgcattcagtattgtactgtatatatcggcgtaatttgtaaaaagtgaatggcagctcttcaaaatcgaattccgaaggcaacaagccgcgttcctcaaaaaagaaacttttttcctaataaccattgactttccaactaacagtgataaaatagtcaaggatttttccaaagaagggtgtaaataatgggtaccttagtaatatttaaagaaaacgaaatgactgttttagaggatatcagtgaagaaacttacctgaatatgaagaaagaatcagctgaccttcaagaagagcatcctccgtatctgatttggcacgaagaccttcattttgattatggctattaatgaaattggcacatataaacaataatagaacatgatacaataaagacaatcaaatcgctggttgtcttctttttttctgaaaagaaaggtatgtttagaaaaaaggcgcatacaatcgaaatatatcagttaaaaaggtgacaaatgatcagctagtggtaaaataggataaactcattatatttgttaaggtgatgaattatggaacatttgctgaatccgaaagcaagagagatcgaaatttcaggaatacgcaaattctcgaatcttgtagcccaacacgaagacgtcatttcacttacaatcggccagcctgattttttcacaccgcatcatgtgaaagctgccgcaaaaaaagccattgatgaaaacgtgacgtcatatactccgaatgccggctacctggagctgagacaagctgtgcagctttatatgaagaaaaaagcggatttcaactatgatgctgaatctgaaattatcatcacaacaggcgcaagccaagccattgatgctgcattccggacgattttatctcccggtgatgaagtcattatgccagggcctatttatccgggctatgaacctattatcaatttgtgcggggccaagcctgtcattgttgatactacgtcacacggctttaagcttaccgcccggctgattgaagatgctctgacacccaacaccaagtgtgtcgtgcttccttatccgtcaaaccctaccggcgtgactttatctgaagaagaactgaaaagcatcgcagctctcttaaaaggcagaaatgtcttcgtattgtctgatgaaatatacagtgaattaacatatgacagaccgcattactccatcgcaacctatttgcgggatcaaacgattgtcattaacgggttgtcaaaatcacacagcatgaccggttggagaattggatttttatttgcaccgaaagacattgcaaagcacattttaaaggttcatcaatacaatgtgtcgtgcgcctcatccatttctcaaaaagccgcgcttgaagctgtcacaaacggctttgacgatgcattgattatgagagaacaatacaaaaaacgtctggactatgtttatgaccgtcttgtttccatgggacttgacgtagttaaaccgtccggtgcgttttatatcttcccttctattaaatcatttggaatgacttcatttgattttagtatggctcttttggaagacgctggcgtggcactcgtgccgggcagctcgttctcaacatatggtgaaggatatgtaaggctgtcttttgcatgctcaatggacacgctgagagaaggcctagaccgtttagaattatttgtattaaaaaaacgtgaagcaatgcagacgataaacaacggcgtttaagccgttgtttttatttttttggaaatgaaattttaaacgctgtgcctttttcaggatggctgtccacatgtataactccctgatggttttcaatgatattaaatgtcaccattaatccaagccccgtacctttttcttttgttgttaaaaatggctctccaatccggtttagtaccttttcaggtataccttccccttcgtctttgacagtaacatgaacagaatgctcatcttcggttatgataatgtctactgttcccccatcaggcattgattcaactgcatttttgattaaattaatgaatacctgctttaattggttttgatccccgtttatataaatgctgtctttttcataacttgttctgataaaaatgccatttaaattcgcctgcgtttctaacagggctgaaacctcaccaattaattttttcaagttcaaatattctttgacagcattttgctgaggtttcgccagcatgagcagttcactgagtattaattcgatacggctgagttcagaaaacacaatatcaaagtaatgttcgttgccttccattgtcggtttcatcagctgtaaaaatcctttgatcgctgtaagagggttgcggatctcatgggcgattcccgccgcgagctgccctgcgattgataatttttccgatttcagcatcaattcttctgtttgttttctctctgagatgtcccgaagaatgacctggacggccgcttcaccaaaaaaggtcgtcggaatgcagaccatctccgtatagatgaccctgttctgaaaggtgaaccaggattgcttgacaatttcagattctgttttttgctcggcaatgttttggattctctcttttacatcctcgtgatcgcaaggatgcagctgatcgtatatgtttttgccaattaaatcctcatatgtagccgcttcaaacagggaaattcccgattcattcataaatacccattttccattgtgaatcaccgcaatggtatcaatggaattttgaatcagcagctgatatcgttcacggcttttttgcaggatggtttggaattttttccttgaagagatatcgatcagcagcagcagctcagcctgctggtttttgtagacggtcggggatgctttcacttctaaatgaacaggtgtgccatcaagccttttccacgtctgttcaatcattccgacttccattcctttttgcattcgtataatcctgtttttcacgatatcatgatattcttcttcaataaattcataggacgatttaccaataatagcatccttgcttttggctcccagcattgaaagcatcgcgctgtttacatagacgatcttgcctttgacactgatgcatagcggactcgggagattttcaaccaaccgttcataatcatccgttatatatgtagtcgattccgggcttgcaggttcgatttcatgtttttcgcagtttagggattgatggcctgtttcttcttcaagaaccttcattttcaaaatgatttcccgttctgtccgctcagctcttgtcgtaacaatttctaccgcagcctccacccacacaatcgtatgatcttttttaataaaacgaaaggtgcacggcatcagatgatgttcattataaaaatagctttcaaccaaaaattggtcttcctcatgcagaaacgttttgaggaatgatccgatcatctctccttggagatagcccaaatgcagtttggagttggcagatatataaatgatgcgtccattagaggccaagactgcatgaatatcggtttttgtttgaagtggtttaacatgctgcgtatcctgttccacagaatccctcctttgcatgatcatcgtgtttcgacatatacagattgacttttacctagtatgattcgctagaaaatgagtattctccttctattcttatggtgaacgtcaatttttgaataaaagaaagggcacacaatcttttagttgtgcaccctgttttttattttttactgtgttttttttcgagctctgcgtaggcgtggatagctcttttggcaataattttattgatcttatcatcatcatctactgatggaacaacaacactaaaggccacttttggttttttcgacgggtaatagccgacaaaagtcagattgtatgtttttttcccccaccagttgcgattcgtgccgtagtaaaatgtttccgctgttcccgttttccctgatacatcttctgtaaacgtattttttgctgtccctgaagaagtgactaatttcatgcctgtttgtacttgtttcaaatcgctctctgaattattaatcttattgagtactttaggtttcctatgttcaatcgccttacccagctggtctttttttcctggcttatgaatacttgtgacgattctaggctgaacacgatagccaccattggcgattactgagatgtattgagccatttgaagcggtgtgtatgtatcgtattggccaattgctaagtctaaaattaatcctcctacagttttaggtgtggtttgcattccggctgattcctgcgggagatcaatacctgtctttactcccagaccaaactggctgtaatagtttctcattttcagtagatcgttctgatcagccgggagagatccatgcggcttgtatgttacgcctgcaatatgcatggcaacattgaacatatatacgtttgaacttttttgcaatgcggttaattcattgatggttcccatattagtataagatttttttataagattcgttcctaaaagcattggagcatcgatataatatttataatgcgggatcccgtcctgatagccggctagcacggtggccccctttactgctgatcccatttcatattgggtggtaaatgcccctatcgcataatcttcaattttgttggtttttaaatctatctttttccctgccattgataaaatatcgccgttattcgggtccatcattacggcaaaggctctgtcaagcatgtaatttccgcgtgcacggctgtttcttacttcttcttcaatgatcttttctacctttgcctgaagctccatgtcaaaagaaagctgaagatcgtatcccctgctgcccttatcaatggttttttggctgacgacatttcctttattatcttctacgtattccactttttctttatgcgaatttaaatattcttcatattgatactctaaataactttttcccaccctgtcattattcgcatagcctcttgttaagtagaaatctttccggtcgctcagcaggccctgatcaggtgtcgtgacgcccccgaaaacagaataaagggttttgtcataaggatattttcgtgtccaatcgtttacgatatcgattcccggaagttcttctaaatgctcagaaacaatggaaatttcatcatatgttaagtcattttttggtctttgcgaggagtttttcttctcatcaagcagcgctccgttttttccattgctattgctcttatttggattcattgcctttacgatttgaggttcgtaagcatttccgcttgaaaaccttgtatatatcgcagcagtttccatttcttcgtcatcttgctgaatagcctttaattcttgatccggaacacgctctatttgaagcttgtaagcctggtctcctttcagattgctttctgattccttaagcagagcggcggcttttttcggatgagctgcgatccagtaatcacgaagatccctttccttcaaaaattcggtatcaatatgaatgaaagaagcaagccgcttcgctgttttgattttatcttctgtttttgtgctagatgttgatacatacacaatttctggaacgctctggttgtcgacagcaactttctggtttctgtcgtacatcttcccgcgaggcgcaggatagtaagctgtttttgcatttgatttctcagcgtcttcttcatgctgttcgccttcaacaatttgaacaaccccgagcttaaaaattaatgcagtgaatagaacaaagacagctaggaaaaaaaggttcattctgattgctctgtttcctttgctctttttctttggttcacgtcctatttcagtcacttctggttacccctctcaaatcattcaatatatttacatatactgagattaattgtaacacctttgtaatagttgttacagcgaaaaggagtaaaaaaagctgtcaatataaaaacacattaaaatataactaacggttcaaaaaaaaggaagctatgtaacggtacgataaaatcatatataccgctgattcccttattcttagtgattcaacggatttactttacgaaaatgacaatctctatttgtcaaaggaaagtgctggaatctttatgacaaaaaagctatgttatgatttttctgtagaaacaaacaactctaggaggttacgaactaatgaagaaagcatttattttatctgctgccgctgcggttggattattcacattcgggggcgtacagcaagcatcagcgaaagaactctcctgccagcctgtggttacagtaaaaacggggaacacagtacaaaacatgtcacttaacgatgcagtgaaaaaactgcatattaacacaaatatcaaaacgttaaacgctgcaaacgaaaaagagatgaagcagcttcttcaaaaacatgcgaagcaatctaacgtgaaagttcaggatgttcaaaagacagaaacggcaaaacctgcacaaaagactactgaaaaagcagctgctgatcaaaacactgcttctaaagcacccgcaactgctgaaaaaacaaacacaacaacgtctgcaccttcatctgtaagtgcatatgagaaaaaagttgttgaacttacaaatgcagaaagacaaaaacaaggcttaaaaccgcttcaaattgatgaaacgttaagcaaatctgcacgcgcaaaatctcaggatatgaaagacaaaaactactttgatcaccaaagcccaacatacggctcaccgtttgatatgatgaaatctttcggaatcagctacaaaacagcaggtgaaaacattgcgaagggccaaaagacaccagaagaagtagtaaaagcttggatgaacagtgaaggacacagaaaaaacattctaaaccctaactttactcacatcggtgttggttacgttgagtctggaagcatctggacacaacaattcatcggaaaataataaaaaaagattgcctgtttcgtacaggcaatctttttttatttcacccaaagcttatatatactctgtgttccgctgttttcttcaccttgagcagctagcttgtcatataaagattttgcgagcgacaagcctggcatttcttcccccattaattctgcttcctctagtgcaattcccatatccttaataaaatgcttcacataaaatcccggttcaaagttgccttgcagcatacggggagcaagatttgacaatgaccagcttccggctgcgcccgttgtgatgcttttcagaacattttccggctctaggcctgatttttgggcataagccatcgcttcagcaacaccgatcataccggctgcaattgcaatctgattgcacatcttggtatgctgtccgcttccagccggtccttgatactgaatattctctcccattaaagagaaaatcggcatgcaggcttcaaaagcttctttttctccaccgaccataatcgcgagtgttccgttttgtgcaccgatgtctccaccggaaacaggagcgtctaaagcgaacaatgctttttctttggccgcttcagcaatcttcttcgcaagcgaaggcttagatgtcgtcatatcaataagatatgcaccttcttttgcgttttcaataattccattgcttccgaaatacacttcttcaacatcactgggatagccgaccattgtgatgataacatccgcttctttcgaaagatctttgaccgtatctttccagatcgcgcctttttgaagtatgctttctgctttttcttttgtccgggtgtacaccaatacaggatggccgtcattgagaatatgtgatgccatgctttttcccattactccaagaccgataaaaccaattgtttttttcaaggtcattcctcccagatgtttcgtttagattttagttaaaatttatcatttttccttcattttctagactaccatatctattcatcttataaaataaaaaatccccaaaacaaatgatgtttggggatgtaattggattacaatgtgaattttgcaattgtgttcataagctcttggcttgcatgttttagtgtttccgttgagtgtttgactttatcaagggtgacaagctgttcatcggttgatgcgttcacttcctctgctgcggcagctgattcctgtgatatggctgaaatgctttgaatggcttcagaaatcgcaagctgttcttcactcattctttgaatttccgcgtaaatgtgatcaataccttgtaccagtgactgcatttctgcagttatcgtatttaatacctctccagtttcgtgaattgcactgttttgttcatcattcattctgcttgcctcaaccatcgcgtgagaggcctcttttgtctcaagctggataagcttcacagtctcgctgatatgctttgtagaaagggctgattgctcagctaacttccgcacttcatcggctacgacggcaaaaccgcgcccgctttctccggctctggctgcctcaatactggcatttaaggcaagcaagttggtttgatcagatatgtttgaaatcgctgtaacgacttcttcaatattcttagtttgattttccaaatccagcagcatcgtttcaacctttttcgtttccatattggcttcgtttgatttcatcagcagctggccgagcgcgtcaagtcctttatagcttgcatcctcggacgattttgagcgttctttaattccgcctgcctcctcagcgatttgcctgattttcgttgacaggctttccgatttttcattaatggtttcaacttcagaagcctgttccgatgcccctgcggctacttcttcaatcgcttttgcaatttgtccgcttgtttcattagtttcggcagccacagccgttagttgttcagaggtgtcagatactttccctgaagagagtctcacttgctcaaccatttccttcatattttcaaccatcagattgaaatctcttgttaaaataccgacttcatccttagattttgattccgcgcgcactgttaaatcgcctgcggaaacagctttcgtttttacgatcagctgctgtatcggaccggttatcgttttggccaggaagtagctgagaataattgttatgataagcgcaatcaatgatatccaaagattggcccgattcattttatctgaaatccacattaattgatcggtatcaaattgcgttccgaccttccagcctgtctcgccaatcgtttggtacacaaccattttcccattcacatcttgtatcccttttttctcggatgcgatggtttgcagtgtttgatcctttgatatattttttccttgatttgacggatgggctaaaagattgccgctcgcatcagctaaaaaggcaaatcctttgtaaggcaccttttgtttattgaccatactctggatagcagagagtttcaagtcatagctggcaacccctatcactttttgcctgtctaagatcgctttcgatgcagtaacaatcatgtctcctgtcacgacatctttataaggttccgtccaaacaacttgatccggggtttcagctgcaagcttataccatggtcttgatgttggatcgtaatcctcagcgaaatccgcttttggatatgtaaacatttctttttttgcggtgcctatgtaagccatcgcaacataatcatcgttgtctttgatttgcttaatgtcatcgtgaaacagccgagaagcttctttacttggtttcgttacaaatgtatgcgttaattccccattagccaatcttgataacgaaatggcataactctttaattgcaattcaatattttgttcaagtgactgcgtcacgttttgagttgtatttttcccatcctctgtaatcatcggttttagcgtcaaataagaagacagcattaagagaacaactgtgatgattaacataatcgaaacaaaaacagcaatcttcatgtgaagttttttaaacaaaccaatcccctcctaatttctatatcggccctttcgtttgaaaaatgaataatcaaaaaataaattataagaaaatcggaatatatttactgaaaattcaatcttcgttataatgaaacaacataaggagagtgatgatcatactaaaacaaatgtatgtgcatgacggcagaaaatttgaggctctgaccattagaaactacactgagactgacatcgagaggctgatttctcttcaagaagaatgtttccctcctccgtttccccaggaattgctgtggtcagaggaccagcttgccagccatatcaaaacctttccggaaggcgctttatgcgcgctcatcaatggcagaattatcggttccatgactgctcttattgtacaatttgagcctgattctcctgatcatacatgggcacaagcaactgacaacggatcgattaaaaatcatgaacctcatggaaatactttatatgtagtggatatttctgtttctcctcattatcgaaagcttggaatcggaaaatggctgatgaatacgatgtatgagctgactgttgataaaagactggaacgccttctcggcggcggccgcattcctttgtattataaatacgcacacgagatcagcgctgttcagtacgttgaagatgtgatggaaggcaggaaaaacgaccctgtgctgtcctttctcctccgttgcgggcgttcacctattcgtgtagtcagcaattatttggaggataaagaatcattgaattacggcgttttgatggaatggaaaaatgttttttataaaaaagcgagctgttgatcacaacagcccgtttaagtgaaatattcaatttttgcgttagggaaaaaggtatcaatataggattcaagtgcctctcgaagtgcatgctcttcatctttctgataaatatattttccgatcccgtaacggccccatttataacggcgcttttcttcatctaattcgagcttcgtcttcggataatttttctctatcactcgtttggccggttttgtaaaacggtgttgaattaattcaaacgtaatgtcatgtctaacgtcctgcggcaaagcagcatctagcttttcaaacagatgtctgtatccttcttcccagccttcatgaatataaatcggagcaacaataaagcctagcgggtagcctgcttttgcaacttttactgccgcttctatccgcttatcaagaggtgaagttcccggctcaaagtttttaatcacatagtcggcattaatactgaatctgaatctcgttttcccgttatgctttgcgtctaataggtgatcgacatgatgaaatttcgttacaaatcggagctttccgagatcactttggccaaaatgttcaatggcgcgcttcagcgtgtgtgtcagatgatcaattcctacaatgtctgacgtacatgatgcttcgaaccttgtgaactctggtgcgcgctccttcatatacttatctgcctgatctaaaatctcttcgacgtttacataagttctgatatacggctttgatcccatggttgtttgcaggtagcagtaatgacaatgccccatgcagcctgttgcaaacggaatggcatattcggccgagggtttggatgaatcaaactttaatgttttccggacaccgataactaaagttgatttcgcattgcgatattgctgaagatgatttttcccagggatattacgcacctgattgtgggatgtcgtttctctgatttcaatacccatattctcaaatttatcttgtaattcttggcccagcggatattccagcgccctcggttctatatacacaagctgcggaacaaatgggttctgcatgatgccacatccttttcctttactaacgttacttttctcactaggcggaaaggatatgagttgtaatgatttccttgttactcatacggatcaatatcaaacagttctttgtaaagcgatttagcttcttcatagcttgcaaacacagcatcgtcctctgcgaatggatgataggtttcataaataaacagggaaagctcgccttcatggtatggatggtgcacaatttcggcttcctttatgtgggctacattggcggcgtgcggatttctgtagatcacataaacagtatctcctgcgttaaattggtttgacatactatccctcctagccatgttattgtgtccttctatacccttacttatgaaaaaaaccagacaggccggaggccgtctggtttttgtacattacttgaatgtttcttttacgaacgcgacaacttcttctgtcgtgctcatagataagattttctctttgaatgactcagcttcttgtttagacaatttgctgatttgtgttcttgccggaaggatagacgttgcgctcattgagaactcatctaagcctaagccgagaaggatcggaatcgcaatctcgtctcctgccatttctccgcacatgccaacccattttccttctttgtgtgctgcttcaattaccagtgtaattaagcgaaggattgccgggttgtatggctgatacaggtaagatacacgttcattcatacggtcagctgccattgtgtattgaatcaaatcgtttgttccgatactgaagaaatcaacctctttagcaaactgatcagcgatgactgcagttgacggaatctcaaccatcattccgacttcaatatcgtcagatacagcctgtcccgcttttacgagcttttctttctcttcaagaaggatcgcttttgcttctttgaattcgttaactgtcgcaatcatagggaacatgattttcaagtttccgtatgtacttgcacgaagcagcgcgcgaagctgtgttctgaagatttcttgctcttcaaggcaaagacgaatcgctctatatcccaggaacgggttcatttctttaggaagctgcaggtaaggaagctctttgtctccgccgatatcaagtgtccgcacgacgactgattttccttccatacgctcaagaaccgttttgtaagcatcaaactgctcatcttctgtaggcagctgatctcttcccatgtaaaggaattctgtacggtaaaggccaactgcttctccgccgttttcaagaacaccttttacatcatcaggagtaccgatgttcgctgcaagctctacatgatgtccgtcttttgagacagtcggttcattgacaagcttcgcccactcagctttttgagccaaataagcattatgtttttcttcatactcttttacagtttccgcagatgggtcaataatgacatcgccattgataccgtcaacgataacagtcacgccgttttggatcgtgcctgtagcagctttcgttccaacaactgctggaatctcaagagaacgtgccatgatggcagagtgagatgtgcgtccgccgatatcagtagtgaatccttttacgaactcacggtttaattgagctgtgtcagacggtgttaagtcttcagctacaataataacctcttctgagatcatgcttgggtttggaatttcgacgccaagcaggtggccggttacgcgttttgttacatcgcggatatctgccgcacgctctttcatatattcgttgtccatagattcaaacatagtaacgaacatagaagacgtttcttttaaagcgaattcagcgttcactgaatcagtgctgattttttctttcacagggttcagaagctcagggtcactgagaactaaaaggtgagcagaaaaaatatcagctttatcctgacccagttctttcaaagcgtgctctttgattttttcgagctcttcttttgaacgtgcaatcgcttcatcaaaacggcttacttccgcttcagaatcagagatgtttttcttttcaaccgttaaatctggctcttcaagccggtacgcttttgcaatcgcgatgccggctgaagcaccaatcccttttaattcttgcattactcgccgagtccttcgcttttcattgtttcttctaaagcgttaagagcatcgttttcgtcagctccggaagcagagattgtgatctcagcgcctttagcgatacctaaagacataacacccataatagatttaaggttaactgttttgccgttatattctaaattaacgtcagcgtcgtatttgctagcagtttgtacaagaactgtcgcaggacgagcatggattccagaatctgcagttactttaaatgttttttgtgccatttttatcattctccttttaacttaaagctttattacttcacaatattatatcatacaaccgtacttgtcatctgacaagcacggcgtactaacacccttatttttcaatcttcacaatatcttcttgttctctgttgactgaaccgcttgctttaatgctgactgtttctccttcagcaaggtttgtaaatacaatcggtgtcatgagagatggtacattcggtttgactgcatccagatcaacttcaagaagtttttgtccaggctcaacgcggtctccttctgatacgaaagacgtaaatccttcgcccttcaggctgacggtatcaataccaaagtggattaaaatttctcttccgccgtcggattgcaggccgatcgcatgttttgtcgggaacacattgagaatttttccgcgaaccggtgatacgacaattccttcagaagggagaatcgcaaaaccgtcacccatcattttccctgagaagacttggtcaggaacatccgtaattgggtgaatttccccggtaatcggagaaacgaaaacttcctcgccgatttcattttgcagcggttctgcaatcacttcctcaacctgctggcctacttcctcttgagcagatgttttcggctcaggtctaggcttgcgtcccgcaataatgtcttgcatttgtgtttttaacccgtcagaacgcggtccgaaaatagcctgaatgttgttgccgacttccagcactccggaagcgccaagctgtttcagacggtctttatcaacctttttctgatcgtttacagtcacacgcagacgagtgatacaagcatcaaggtgtttgatgttttcctggtcacccattgcctgcagaatctcataaggaagatctcctgcttcacctgttttcccaggtgctgctgtttcttccgcagcatcctcgcgtccaggtgttttcagattaaatttgcggatggcaaatcggaatccaaagtagtaaatgaccgctaaccctaagccgacagggatgacaagccaccatgccgtccggtttggtaaaataccgaataggaagtagtcaattaaaccgccggagaatgtcataccaatcttaacattcaacagctgcatgaccatgaatgaaagtcccgcaaacaaacagtgaatcgcaaacaggactggagcaacgaataagaaagaaaattccaatggctctgtgatccccgttaagaaagatgtcaaggccgctgaacccataatacctgcaacgagttttttgttttgcggttttgcttcatgataaatggcaagcgccgcagcaggcagaccgaacatcataaatggatatttacctgtcatgaacgtacctgccgttaactgtacgccgtctttaatctgcgccataaagatacgctgatccccgcggatgatttctcctgctgcactcttatagctgaagaattcataccagaacggtgaatagaaaatatggtgcaatccgaatgggataagcgaacgttcaatcaccccgaagataaatgcagcaagggttggattcgcttccactaatcctgttgaaaaggcattcaatccatgctggattggaggccagatcactaacataataagacccagaatcagtgcagaaattgacgtaacaattggaacgaaacgtttacccgcaaagaaaccaaggtattgcggcagttcaattgtgtaaaatctgttaaacaataatgcagctaacacaccgacgataataccgccgaacacccctgtcgccaaggtaggtataccaagcatgtttacatatgcaggatggttttccgtaaagaacttggctctttcaactgaatccgaaggaatggttccgtttgcaagaagaaccgcactcatggatacattcattacaagataaccgataattgctgcaatccctgcaactccatcaccattggcaagcccgatggctacacctactgcgaaaagaagcggaaggttatcgaaaacaatctgcccagcactttccatcacacctgctacaagctgaacattgtcattgctcaagaaatgcaggacctgaatcatgtccttattttgcatcgcattcccgatcgcaagcaaaatacccgcagccggaaggatcgcaactggaagcataagcgcacgcccaattttttgaagaacgccgaataatgctttaaacataagaattgacctcctctttttactagtctgaccttacagctaaaaatcatgacaacgaattcacaggcgtaagtcttccagtttaaccgtttacatttgcccttttacacaacaaaaaggcatgagcaaaattgggtgcgcaaaagaacgagaatgaacttcccgtttttttccctcaatcactcatgcctgatcgaatcagtaacacgttataaggataaactgaatttatgaaattttattggttaatcggtacagatgaagcgtcagataaaccgcttccgcctcatgaactggtttcttcaatgtttgctgcaagattttaatcaatttccaagctgtattgtagcatagcggatattcatttttcaataacaacattaatttttctggttctttagtcggttcttcttttttaattctttctattgtaaatctgatatgcctgatcagccgcaaatagttgacactttccttatttactttcatttgaaatgagtcttcaatcacctcgacaagctgcgccatgagctgagagtgctgattgacctcggacagcggacggtttgtcaacgctgaatggatatgcagagcgataaaaccaatctccccttccggaaggcagagtcccgctttttcattgatcatatctatgacttctttggcaatttggtactcctcaggatatagtgactgagtctccattagaaatggatttttcatatcaaatccctgctgctgccttttgatcgcaaatgcgatatggtctgtcaacgcaatgtgaatatgttcatttaatgagtgattcgtcctattgcttatgtgatagatgacatcgtttgaaatatcaacgagcttttcatcaacatagtcaaggagctttttaaactgcttttgttccttctcgtcttttaaaatgaacattttatcgtagcctttatcttcaatgacatcatcttgtttttttccgaaaccaataccttttccgattaaaacgacttcgctgtatttatgatgagaagcaattaatacgttattattcagtacctttttcactgtgaaggacccattcacgatcctcagctcctttgtcattcaatacctcatatcgtacataacgaacagaatgcacgtcaaaccttttttcaatgcattcactaaacagtcgatctttcgatgagacggtaatccagaactttcctttcaatcggctgtccttgaattcttttttccaatatggcaaatgcctgctttcccatttcccttgtctgaatatcgatcgttgtgattccaagcgcttggctgatttcgtggttatcaacgcttaagattgcaagctcatccggtactgacacccgctggttctttgcttcaagaaaaagccctgctgagacttggtcattggcaacaaaaatagccgtcggcttttccttccacgtattccatttatgaaaaagcgccttcccatcattgattgtaatcgctttctcaattacccagtcttcacgaaatgcctcgccgatctcttccaatgcctctttgtaggctttgattcgaaaatggctgttcatgcctttttttcttgccaaacagatggctatttttttgtgccctttggcaattaaatagtccaagccgttccgaaatgcttcttggtgaggaatgctgatggttgggaagcgggcattatctgaattctggcaaagcaaaatcgggccctcccattccatgagtttctcatcagcaagcgcctttgagcaaaaaatcaggccgtcaacctggcgctgctttaattgggacagcgcaaagatttctttttgtacttcatagtttgtttggaataaagagaggtgaaccccggattccgcggctgcgtcggctattcctgcaatcagctctgcaaaatatggcagattaaccgtcggcaagacaacaccaatcatgtttgaaaatcctttcgacaaatgtacagcgtgaatatttctcgtgtactccaatgattccattgcctcaaacactctttttcgtttgtcttcactgacgtatggatgattgtttatgactcgggaaaccgttgtaacagagacaccggctttctctgcaatgtctttaatattagccatagattcccttctttctaaatccccttgatctggaatgcgtttcatacaatatgatatggacgtaccagatatctttttgtgtttttagctgaaaggagaagatcacatgggtttcttcattttaattgggttatgtctcactgttctcggtggcagctgtcttgctgtaaaacctctcaaccaaaaacatgaaattaaaccctttcgaacatttgatgatttttttatttaatgcagataaaaaaggacgatgtcgagaacaaagtccttttttatttctattacagtatgatcaaatcctttggatattgggtcagagcaactgctccgtcctttgttacgtgaacgtcatcctcaatgcgtacgccgccgatctctggcacataaatccccggttcgatcgtgtagaccatgccttcctgcagcagtgtatcgttggcctggctcattgatggatactcatggactgaaattccgagtccatgcccaagccggtgaggaaaataatcaccatatcccgctttttcaatgattccgcgggcagttaaatccagatctccgattctcacaccgggtttgcttgcctcaatcgcggctttttccgcttgaagcacagtctcgtaaatggcctcctgcttcggattgatggttttgtatgcaaacgttcttgtaatatcagagcaatagccatcaagaataacaccgagatcaaataaaacaaaatcacctttcttcaacgtggctgtaccaggatttccatgaggctggccagatttttctccgaataaaaccattgtagagaaagacatgccctgaattccttttttcttcagctcatactcaatttgagcgagcacttccacttcactgatgccttcacgcaaagcggctgtgccgacttcaacaccgtaatctgcaagctttgccgcctctttcagcaaacgaatctcattgtcatctttaatcaggcgaaattgattgagtgtttcttctgctgaaacaaattgagccccgcccgtcgcatgcttcagctgttctgcacgtgacagcgagattgaatccttttctaccgcaagcatatgtatgctgatatttcgctttttcaaagccttctctatcagctcccacggattttcgtgatccgcatagccaatgatttcatgattccagcctgcgttgcgggcctgtcctgcttccattcctggacaaacaaagaaaggctcctcttcttgaaaaataaataaccccattaatctttcatgcggctctgtgtaaaaaccggttaagtaaaaaacattttctttcgtatgaataaatgcggcagtatgccccgcttccttcagccatgaagagacgcgttgtattctattcacttcttgttcctccctgccatttgcaatgcattgttctgtcttccattgtaacaggttttaccggtgtttgcctttcacgacgccttcattttctaatgcattttatttcctgctcctcttcctgtatactgacagtaacgttcaatcgcaggggggttgttccgtttgctgatgaattttttcagacgaaaagcagttatgctcttaacggttttgggaatttccgctccttttatcgggatgaagatggtgggcttttattattacagctctatcataggctgtgcagcgggtttcctttgctgcaccctcgctctcatcctagttatgaaaagatctgataaagacaaaaatgaagggaaagcttgatacataaaaagccagcagcctgattaggctgctggttttattttaggagtcttaaaccgtttagtatgactaaaatcgtgctgccctcatgaccaatcacgccaaatggcaattccatcgcctgcaaaaagtttgcacaaatcagcaggcagattacagctagagaaaacacgatattttgtttgatgatcctgttcattttccgagacaagcggcacatgtttacgagctttttcaaatcgtttttcatgaggaccatatcagcggtctcaagtgctacatctgttccgccgcccatcgcaatgccgacatccgctgctttgagtgccggcgcatcattgattccgtcacccaccattgcaatcgttccgaattcttcttttaaccgtttgatttcattcactttttggtcaggcaggcattctgccacgacagttgtcatgccggcttccttggcaatcgcttgagccgtgtcttcgtgatctcctgtcagcatggccgttttaatcccaagtcggttcagttcttccatgacctcttttgcttcaggcctgatttggtccttcagtgcgatacagcctgctatttgatcatcctttttcacaaatacaattgtatgaccgctttgaatgacatctgatgctgtttgtttcataaattgtgctgccatttcctcgccgataaaacctgctttaccgaccttccatttcgcacccgacacttctgccataacgccaaaccctgaggtttcttctatagatatgtagccggactgattcacgccgcggctttcagcgtacgccgttatggcttgggcgagcggatggcttgattgcgtttcgatggcatagacagcctcaagaacttccgcttcactgaatccttctgctattctgatcgtctctacggcaggctggccttttgttacagttccggttttatcaaaggcgatcatttgcactgagcccagctgttcaagaaagacgcttcctttcacaagcataccgttgcgggcgccatttgaaatcagggacagcgccgccggcataatagaggcgacaagcgcacaaggtgacgcgacaaccataaacaccattgcgcggtagaaggtttcactccagctccagcccagcgcaaagtgcgggacgaataaaaggagcgccaccgcaattagcacacctttcacataagcattttcaaatcgttcgatgaaagcctgcgcgggtgaaacactattttgcgctgattcaaccagtttgataatttttctgaataacgaatcttcatttgctttcgtgacacggactgtcaaggagccattgcgattcaccgttcctgtgaatacagtgtcgcctgtgtttttttctacaggcattgattcacctgttaaagccgactcgtcaagacttgtcgagcccgattcaatgataccgtctgccgctacgcgttctccaggtttgatcacaatcatatcaccggcctgcaagtctgaaaccggaactcttttggtttcaccattgaccatcaatgtcgcttcttcaggctcaagctgcattaaagacgttaaatctctgctgcttttattcatcgtgtatgtttctaaagctccgcttaaggaaaaaataaatattaaaatagcaccctctgcccagtatccgatcaaggcggaaccaatggcagcgaaaatcattaaaagttctacattcagcgttttggattcgagtgtttcttcgattccttccttcgctttagcaaatccgccgatcacaaaagccagcaagaaaagtattatggataatacctgatatccggataagagccagcctgccaaaataagagcgcctgatacaagtgctgcaataagctccgcgtgctgtgcccagtttttttccctcttgtctgttttcaatggctcatgcgggtcgcgttgaacgataacttgttcattcatatcgaattctcctctctaattgagaacgtaaatcatcttcatttctcttataaaaacaaaatcgctgcccaaaaggcagctttatcgtcagttatttcttgatgtcttcctttattatagcacgcacgaagagaatttcaattataattattttaatttctttttgataataattatcattaatgtttattcacttcttctctatatgaaaaaagctgagagtctatgctctcagctattcttccgtccattccttcagttgttccgctgtcatcgggccaatttttgttttttcaatttctcccttttcattcagcaaaaatgatgttgggatcgtgatgatatgatactccttcatcaattccccttttgagtcaaggacaatcggaaacgtcagcttgtttgctttaataaagtcttcaacgacttgctgattttgttccgaattcactaaattcaccgttaccagctttacactgtcggatggatgggcatcataaaacgattgaaactgtggaagctcctttttgcagggcgggcaccatgacgtccaaaaatggagaattgttttttgccctttattcggaatcgagatgtcctccccttctatcgttttcataagaaaaacagcgggaacagcaggctgtttttcctcagcttgtgccgcacctggaaaccatgcaatcaaccctaataacataatgtatatagtaagcaagcgcttcgtcaacatggaatcttcctttcatgcttttcaattagcttgcccctgctgttcctttatcatccttcaattcgcggcgttctggtccctcccgtaagaaatacagataccttcaatgctttgcagatcgtggcatagtgcaggctcgtcaaaagaatcatgccagtgttcattccaaggataatcccgagcatttgcagattctccattgatcccagtacatacatcatacttagcgcaacgatatggctccatacattgtgataaaaagcctctttcacaaaacccatcccgattaagcacgcctgcagcggcatgacaaacagatgaaagagaaagtaaggccacaacagctgcaagtaatactgcgcttcaggagagtgaaaaaacaaatgcgtgagaggtcccgcaaactggaacatgacccagacggcaggtataccgtaacctaatgtaatgaaaatcgactgcttcagcctttttaacacgatgtcatactgagaaagtgcataagcttccgaaatactcggtatcatgacgaccattaacgaatgggcaataaaagcagggaacgaccctatcgtcacagccactcctgccagcattccgtattgatcgatcgccgctgtcccggcaacgcccgcagccaaaagagctccttttactaaaaagggttcaattgcattgacaaccgcatgaaaaatacgcagtcctgttgtaggaattgaaacagcaagcagtcttttccttacatcctttccgcgcaaatgaatgtgctgctggccggataacgcccgccttgccatgataaattgtgaatataaataaacaagcacgaccacatcactcacgactagaacaaacaaggaaatcagcacagccatgtccaattcaaatgagtaccattgaaaaaagaggaataagcacaagagctggatgatttttttcagcacattggcaattgcgatcttccccattttctgcacacccataaagtagcccctggcgattgaagtaaaggcgacaacaggaattaagccgatgacaatccctttaataaacgggtggtatgtatcaaataccggaataaacggaagcgcaatactagcggcggcagtagaaaaagcagtaaaaatggctgtcattctgaaagcgtgcctcagcatgctttcatgaagcttaggatttgactcggcaatgaatttagaaatggatatcggcagttccaggctcgcgatgacaataattaaaaagatcgtgggcaaaatactcatgtaaagccccatcccatgctcgccaagctcccgcgccaaaatcatattgacgacaaattcaaggcattcagcgaaaaaggcggcaatggataaaagaatgatccctttcacaaatcgattcatgatgtctctccttgtctcttgtactaccaacatcatatgagacaagttcaaaaattattttatttttactctttatatgaaaaaaagcacagctgagacaaattgtctcttctatgcttagacggcaaaaacgtgtctgccgattttttctacgatttttcttgaacgaatccaattatctgacgctgttttcggattataaaagaatatggcatctgtttctctattttttgaggacagcgcttcttcggcagcttcaatcgattctttatcaggcttttggttaatgctcccgtttgcgaccggttcaaaggcgtttttctgataaataactcctcttatcgtatcaggaaaaccttttttctccgtcctgttcagtacaacgcttgctacagcgaccttgcctttatatgattctcctttggcctctgcgtgaacgagacgggacagcaactctttttcagactgtgtatatgtttctttctcatcatttgttttgtccggtttatctttctctttcttttcagtgtgtgctgatagcttaatcggttttattttcttgtctttatcagcagacagtgaagggaaagattcattcgtatttcgatctatatgtgtaagccatttcgcttcttcatgttttgtcttctttgcgctcagtagtgaagcttgtgtatgctcaattttggctgcaggcatgaaacaaagaagaaaaacagccagagcagtgaatttcgttgtcatacagtttcctccttaaagtgctccaaaaaacacttcataaccttaacaagagatccattcattttcacggaaaaagattttccaactctcccaaggaggtatcaggatggaataaagaggatgactcactgcttaatggcaaaaaaacagtctgaaattctataaatattgttaaattaaaacatgtttatccatctttggtactttacattttatttacacctgttacagacagctgtaataaaaggcttgtgttctgtcatatatgataaaaaggcttctcacgtatgagaaaccttcagcttcttggctgttctaagtattgaaagataacatctccgccttgctgggcaattcctcggaaatgtttaaaatcatcttgtttagataacacggccctgaaatcaagaaaatgctctttctggactctcagttcgtttatggcgccggtgcgcagctgttcaatcatttctgttatttcttcgggacgcaacaaaaattccccccttttctttctattgacgaaaatcaatatatcatctttatagcgacagaacaattcataagggagataaaactccttatcgctttacttctcaatgaaaatactgcaaaatactttcaaaaggcattattatgtttaaaggagaggaagcttgtgaaaatcgctaaggttgggaatgtcattgaatttaaaaacggattaaccggtgttgttgaaaaagtaaatgagaattctgttatcgttgatgtgacgatcatggataactatcgggatcttgagttagattcattgacagttgttaatcataaaaattataagatcatcagagactcctattaaaacctccttatttccacatttattcaaaaaactgcaagacggacaatttaacaccttacatatgaaattcgctttctcaaaagctgccggccggcagcttttttacataaaaaacaccgatcatgaatcggcgtttttgtctatttccgttatttctatatagaactcgctgacggcccctggttcgtacaggttggtcaatgatgttgaataatttgtcatttccccccggaaggcaagatcgcgttccggaacctcgacattaaacgttttttcatacaacaggacagcgatatcatggtaagtctcactcgtaacgtttaaggtaaatgcaatttttcgcttcggctcgctctcctcttgatatgcagccatttctaacgttacattgtttaaccgcaatgtcttcacttcatatcactcctttatagtccatgcatcttagcataccttagcgaatgtttacaatgaatctgttcttaacggttatatgaaccaattcattcgaaaagacacctttacaaacatacgttcgttaaattataataaaacagacgagctgccatccagcatcccgtcttttcattagaaagcggcgagtggaattccccccggattcgctcgtcttttttatgtaaaaaccccctcatttctaaggagaaaccatatggtcgattatcaacaagtcatgcttcaccatgcgtacaatcaattctcatcatgttttttagataaaccagcatccattcaggaagtatatgagtgtatgcttttaaagttctagttagtcgtgcgcttccatatcgatcctgaacaattctgaatgaaatgcgataaccctgctatcaagtagcatgtgtatgattaaatcatggaagcagaataaattcaacacatccgtaaaatgcgtactataacataagtttgaatgtgtatttcaagcccaatgtaatgcctcgtgtagaacattttgggagaagggcctatggaatgccctcactgttttacccgcactcgtaataaactcctttcagtatgtccatttagagattcattgcaattatcttcgaattttgttctgaactataaatcattatatatttttaaacactgtattccagactgacgcatcttcttgtccaagactccagctgccaagacctttcagattatatttttgagcgagttttatttttgctctgagtgactgttcattttcaaaccataatgtatatgttcccgaaggcaacggcccctttttatcgtgattgacagtaaaaatagcttttggagattgactcttggtgtcaaaaataattgtcccgctatgcctttttactaacaacaaggtaaaggggaatggcttgagaggcagattggccttccatccagcagcggccatagaatggcaatcctaaaactagtttttgaggagagattttttgggtcagaacatattgaatggacttttccacccatcctacacttgcagtaggcccagcaaggcggctttcatcataggccataaccataagataatctgcatatttagctaaatactcgtaatcatatgatccgtgccagcccttcgtccagccaaaaggatttgccgccactgcaactgatacttctttatgtctaggaatacttttccttactaatctaataaaatctgtaaatagattccgatctttttctgtaaggttttctatatcgatattaactccatccaaatccagttcttctattgcatgagaaatttgtttagctaaaagaactcggttcattaatgcaaatcgtcccaaatcctgatcccaatgattgcttagaaaaggaactacttttaattttcttctatgaagagctttaatcacatcgggattagctgaacggagaagtaatgatccatcttttctgatatagaaaaaatcaggagacacaacatttaatactccgttcgtttgatcaacgtgttgaataaagtcccatcctaatccagaatagtaatagctcatttgaaacatctcataaccccttcatccccaaaaatatcaagttccccacaaataaaaaaatgaggattgtcatttcaatttgattcgcttccgaaacctcaaagattatctttctcttatctttataatttgtccaggataaattctatctgaagaaagcttattaagattcataagttgttgtaccggaatttcaaaggatttggcaatcgtccataatgtatcgccggattccacatgatatacttcgtatgtcacgggaaattccatataacgaggcgttctttttactttattcgcttgatttcttattttaggtattttccccttcattcatattactctcctttagaataatttgttattaatatttctaaacagtttctctctaatcttaatgatttgtccagcatatatttgatctgatttgaaatgattaagctccatgagttgctgcagggaaacattatacttactggcaattattgataatgtttcaccgggagtaacatgatggatcacgtatttttctttgagaacatctacataatgaatggtttcccctaagtttcttatgattcctctgctttttagcacctcaagcattctctcggctctatgccgataggaatcattctttacagcctttttaccgtttatctgaatcttttttctctcgctatcatgatttaaatagtatttaaccttttccaatgtttcttttggggaggaagaaacgatgagatcgcggccaggtttgaatttacctcgaactgctggtgtatccgatgtcaataaaaaccccccggaaccaagaatctcataggtgcgttgtgtaagttggctttcacagttttgcaaaccgataatgatttttgctgaactgtaaactttatatgcttcagtataatcaaggtatccatggatccaattgcggggaatttctcttcctatatatttactcattttttcccagtttctcccccaaaaatcaatgcgaatacccttccgtataagaggacgaataagcgtttttaaagaggacgaacggaacacttccggatgttcttcaagaaaattagggtaagcattagccaccactgctatatcacaactgtatttcgctaatggtttaatctggtgatgtatactttcgtgaaatgcaaagtctaagtgagctgctttaatccccatgctttcataagttttacacagagaaggcgtgaccgtgaaaacaaaatccggtttcatctttttaattaacgggatagtaaagttttgagtgtgcagcgggtcttcagttgcccaataaacgagagggatattcacctttttagtagcgttgcgaatccaggcctgcttttcccttgaatgctctggtgtccatcccatagatactattaaatctggtttaaattcgtctatcatttcagttatattttcccgacttacaggaccggaaatcattacggtatgtcctgcttccctaaacccattcggtaaaccatagagccacatgggatgactctcaaggaaaagaattttcacacatttccatcctctctttcactttttaatgtctactttattggtatgtatatgtaatataacttgtcgcggtactagtctataaaaaacgttcaggtgtgagatcacgagatagcttgtgtgggatgccccacaaaaaaagaaagcaacctacaacatattttcctatgtggttattcaggacataaggattcctttaaatatttttaaaagtattagaatacaaggacagggatattattttttattaaaagtcaagagcccccgttactttaagtacatttattcacagtgtaatcttttttacaggtcatttagtagtagccccaggaaaatgcgaatttacaacgttaatcaaattcaaatataaaaaagtcgaattccctgtcctttaaggaaaacgacttttttatacgacttcttcaagtaaatccccattaaccttttttggggactatttgtaatctctgcgcagtgaaattatacctgtgctagcccgccatctacgaacaattcaacacccgtcaagtaactgctttcgtctgaagcaaggaaagatacagcgtttgctacttcttcaggtgtcccaacttttccagctggaacagtatttctgctattttccagtacctcttcaagtgcatcaccaaaaagctcatcgtaggcaggtgtaagaatacctcctggactaaccacatttacacggatttcagtaccttttaggtcaagaatccagttgcgaactagtgctcttaatgctgctttagatgctccatatacactaaacgctgggttgccaattgatccagcagtagagcccgttacaataatagaacctactttgtccgggaatagtgataacgctttttgaacagtaaagatggttcctttaacgttaatgtcgaacgttctatcaacctgctcttcagtaatttcacctaatggaaggaagttgccgatgcctgcattagcaaaaagaatgtccaacttacctttttcctgctttataatgtcatatagtttgtctaagtcttcaagcttagaaatatcaccttgaacaccggttacgttcttgccaatttggttaacagctttatcaagttcgttttgtctacgtcccgtaatataaacatatgcaccttcgtttacaaatttttgtgctgtagcaagaccaatcccacttgttccacccgttacaagcgctattttaccttcaaatttacccatacttaacactcctttagaattaattttattttatgtctagtacctttaagtacttgaagaacaacttacaagatatagtatccttcagtaagcacattatcggaagtacccacttttttgtgatatagtaactaaaaagtaataaatgtggaatggagagctttagacatgaaaaaatttagctgtgggtttgaagtgacaaaggaagttattggcggaaaatggaaaggccttgtattatactttttaatgaatggaccaaagagaacgagtgaattaaagcgcattatcccaaatataactcagaaaatgctgattcaaacacttagagagcttgaagccagtggacttgtgagcagaaagatgtataatcaagtaccgccgaaggttgaatattcatccactgaacttggagaatctcttaaacctatcttgcaggagctctgtcaatggggaggctattatgcggagcaagagtatgcagaaggtgaatatgaaattgtacaaccagaacaactaagttaggattgatgtagctgctgaagtaaatgctaaacaacttcaataccatcacctaacagatgaagaacagtcagaaataaatgagatattcaattttgaaagtgaagttctaataagaagtgtcatcgactatattcaggagaattgatgaaattcaaaaaagagctgtttcaaatgttaaagagaaggttcagaaacttagccaaaaaataaatgaagatattgataataatatttaatgcctatgatctctagataggcattttttctttcggataaaaaagaaaagacgtacaaattgtacgccttaatctgcttctgtactatcaatttttcactgcataaaagtcacagttcaggttgcacctcaggtcacactttttaatacaattcccatgagtagagccattttcaggtgtgacttttcccacttttattgagcttagtgcgggtcacacttcgctgtgaccaggtcacatttccgctgaaaattaacgctgaatgttcggattttactgtgactccacttccttttacactccgtatcacacaacggaataattaacgattatcaattgtctccggatacaaatcatggttcatcatacggtattcggccattttctcatacttcgtgccaggctttccgtagtttgtgtacggatcaatggaaattccgcctcttggcgtgaatttgccccatacttcaatgtagcgcgggtccattaattcaatcaagtcgttcatgatgatattcatgcagtcctcgtggaagtcaccatggtttctgaagctgaatagatacagctttaatgatttgctttcaaccattttttcatcaggaatgtagctgatgtagattgtcgcaaagtcaggctggcctgttttaggacataaagatgtgaattccgggcaattgaattttacaaagtaatcacggtttacatgtttattagggaaggattccagcacgtccggtgcatattcgaacaaataatttgtaccttgattgcctagcaatgttacaccttctaattctgattcttttcttgtcgtcatgttcatcttcctttctattatactccgcgtttgttgccccataacagggtgtgcagctgcgggagcactctgacgagattcagctccgcatcgacagctaccttatcaacaagcgcttcatattttccaagcaaatgtgcaatcagtgactgatcatctgtcgtatgcacgtcatcatttccgacttgtaaataaaacgggattcccggataccgcttgtgcacagttttggcaaattccagatcttcatcattaaagatgacaaccttcaagctgacagcatgctgtctatcattctcttgaagtgaagttaaaatgtggtcaagcttttgaaagttcgttaccatttttgagcttggcggttttggagaaattgtcaggtcatcaatcagcgtaaaccaatcctgataaacggtcccttgagtttcaagcgctgcacggatgttattttccttcagcagttcaataaaagcatccagctgttttaacagagccgggttgccgcctgagatcgtcacatgagaaaacgcatctcccccaatgtccttaagctccgcaaaaatctcctccgccgtcatccagcgaatatcttttttagcagacccgtcccaagtgaaagcggagtcacaccagctgcaggaataatcgcagccggctgtccggacgaacatcgttttctgtccgatcaccatgccttctccttgaatcgtcgggccgaaaatttctaatacaggaattcctttagccattcaaaccaccctttttcggacggtagacacagtagcttgtcggtgtttcacggacaaacacctgtacacaggtcggcttattctccaaagtgtctaaataagcctgtacgttgtcataaatcgttttcgccacgacttcagttgtcggcagcgaataccggtcgtcctgagaaaaatcttcatgatcatttaatagcgtgtgatcatagtttccgtgcaccagttttttgagtacgctgaaattgacaagaaagcctgaatcgtcaagttcgtcgccggcaacggttatatttacggtatacgtatgcccgtgaaccctgctgcacgctcccgcactttcccgagggataaaatgagcggctgagatatgcatgtccttattcagttcaaacgaataaggatgctgggcctgcggataaatttgagataacaatttatgcacgctctcctttcatcaccatatattcttcataaccttttgaacgaaggtgacatgccggacattcgccgcagccgtctgcgatgatgccgttatagcatgtcagcgtgttgtttttcacaaaatccagcgcgccaagctcatctgcaagcttccacgtttccgccttattgagccacatgagaggcgtgtggatcacaaacggcttctccattgccagatttaccgtgacattgcaagatttcacgaattcgtcacggcagtcaggataaccactgaagtctgtctcgcaaactcctgtaataatgtggcgcgcgccaatttggtaagccaggatagacgcaaaggataagaataccaaattgcggcctggaacgaatgtggatggcagttcgccgtcttttacttctatctcaatatcatttctagtcagggcattcggtgcaagctgatttaaaagtgacatatcaagcaaatgatttttcacaccaagcttttccgcaatggattttgccacttcaacttcctgcgaatgtcgctgattataatgaaaagtcaccgtttcgacttcttcgaattcttttaaggcccacagtaagcatgttgtgctgtcttgaccgccgctaaatacgacaattgctttttcttttttcatgattcctctccttctccgcaataaaaacgccggcgagagacatcgctacagctaattcacgcaaaaaaacaccttttttcggaaggtgctctagaaaaacataaaaaaggccgtatccaaggatacagctcgtccttagttttttatagagggtgtagctagaacctctcccgcatatcgcacggattttcttcaattttttcacttctgctatcttaccataatgatgtttttcttgacaataaaaaagtcagtccccggttcctagatcaattatcgctctatagtgacggttcgtttcattatatatatttataaactgcgccgccgaggagcttttttgcaaagcaaagcgcctatgaaggccaggctcacatagccaaacaagggataaatcgttgaaataagcctgccgtaccctatttggctcgtaatataagccgtgatcataatggctgcaaagatatatttgcttttcactggaagaaagctttgcacttgtttttctaatccatatagattaccgataactgatgtgaacacttctccgaaaataatgagtaaataaatcaaatggacagatcgtgcaaagagataaaccacttgcgccatcggtatatcatacaaaaatacatccggaagagtcgacaaagacagaaaactcgcggacagcacaatcgtcagcatcgtgcctccgattaaagcgcctttttttatcactttctccgatgacatttcattcgccagcggaaccaaaacagcttgggcaagcgataaatttaaagccccgtaagaaactgctgataacagccaatcccagcgatgcggccagacccactgagctgcgtttcgtgattcgctgaatataaaagagtcggccaccacaatcattgaaaagatgattaaaagaggaacaacaaacacattgacaccgaaaatgccttttactcctctagtcatcacaattaaactcagaccgattgtaatgagcatcccaatctgagcggacatccccagctgttcctcaaaaagcgcccctgcccctgaaagcataacagatgtaactccaaggagaacaaacagcataaatacattgataatccgcccagccgtcgccccgaacaaaaatatgttcatttcttgatatgacttggcattgattcgctttgaaatgatcatcagcttggcccccagtaacgtaaacattccgccgctgacgagaatgccgaaaaaaccgaaccagccgaacttcagaaaaaactcaacaatttccctcccagtcgcaaatccagctccgactactgtgccgacatacacaaaagcaagctgacttgcagacccttttgattgttccatttcttccctccgaacgaaccgcagttttgtccatatatgcctttttataacctatgagacaagttccttgaaaagacgaagaaaacatgttttactttgtaacaaatcaaaaatttttgtgcataagacttgaaagtcaaagatagtcagagtatactattaatcaaagttggtcaaacaaaccggccttttttaaaaatcaattggtcaaagatagtcaaatattcagtctgctttgagcatattggtttgaatgccgttaagtttgccgtatactaatagtcaaagaaggtcaaacccaatagacctttttattcactttcattggtcaaagatgatcaaattattaaggaggttttggcaaatgcgttgtcaacattgtcatcaaaacgaggcgacgattcgccttaacatgcaaataaattccgttcataaacagatggttctttgtgaaacttgctataacgaactgacccgtaaaccttcaatgagtatgggtcctcaatctttcggatttccgtttgaacaggcattccagccgaaagaacagagcgcagcaaaacaaagcgaaaaaaaagggttgcttgatgagctggctcaaaatattacaaacggtgcaaaagccggtctcattgatcccgtcatcggccgtgatgatgaagtggcgcgagtgatcgaaattctaaaccgccgaaacaaaaacaatccggttcttattggtgagccgggtgtagggaaaactgccatcgctgaagggctcgctttaaaaattgctgaaggtgatgttccaaacaaactaaaaaacaaagagctatacttgcttgatgttgcatctcttgttgcaaacacagggatcagaggccaatttgaggagagaatgaaacagctgatcactgagctgaaggaacgaaaaaatgtcattctgttcattgatgaaattcaccttctcgtcggcgcaggctctgcagaaggatcaatggacgccggcaacattctcaaaccggccctagccagaggcgaactgcaagtcattggcgcgacaacactgaaagaatatcgtcaaatcgaaaaagatgccgcgctggaaagacgttttcagcctgtcatggtgcaggagccttcaattgaacaggctatcctcattctgcaagggattaaagacaaatacgaggcgtaccatggcgtaacattcagtgatgaagcaatcaaagcatgtgtcactttatcatcccgctacattcaggacagacacctgccggataaagcaattgatttattagatgaagcaggttcaaaagccaacctgttaattgatgaactgaatgatgaggatgccgctgaacgcttaactgcaattgaagccgaaaaaacaaaagccctggaagaagaaaattacgaactggcggcaaaactccgtgatgaagaactcgcattggagaaaaaactgaacagctcctccgctcataccgctgtcactgtggaagctgagcacattcaggaaattgttgaacaaaaaacaggcatccctgtcggcaaactgcaggcagacgaacaaacgaaaatgaaagaactcgaagcaaaacttcatgaacgcgtgatcggacaagaagccgctgttcaaaaagtggcaaaagcggtaagacgaagccgcgccggattaaaatccaaaaacagaccagtcggctccttcctcttcgtcggtcctaccggcgtagggaaaacagagctttctaaaacactggcagatgaattattcggcacaaaagacgctattatccgactcgatatgagcgaatacatggagaaacacgccgtatctaaaattatcggttcaccgcctggatatgtcggccatgaggaagctggacaattaactgagaaggtgcgccgcaatccttacagcattgtgttgctggatgagattgaaaaagcacacccagacgttcagcatatgttcctgcaaattatggaagatggccgtctgacagacagccaaggcagaactgtaagcttcaaagacactgtgatcatcatgacaagtaatgcgggtgctggtgagaaacaaacgaaagtcggtttccaatcagatgacagtgtcatcgaagaacaaacattaattgattcactgagcatgttctttaaacctgagttcctcaaccgttttgacagcattattgagttccgctcattggaaaaagaacatcttgtcaaaatcgtcagccttcttcttggagaacttgaagaaacattggcggaacggggcattagcttgaatgtgacagatgaagcgaaagaaaaaatcgctgagctgggctaccacccttcattcggtgcacgtccgcttagaagaaccatccaagaatgggttgaggatgaaatgaccgatctgctgcttgataatggcgagatcacaagttttcacgtgattttagaagatgataaaatcaaagtgcgagcaaaataacaatcagcggtttccttttaggaagccgcttttttttatactttcatactcttgacttagaaattaccgtcccttctcctgaagcgctacttcccttcatcctttacacttttttaaggagggatggaacatgtttatatacagtgaatatgtatttctactattatatgaataccatctgaaggacagcttgcaagcaagctgctaatttcagtagacccccgggcttttcaattttggagagcccgtttttgtttatttctcccttctatgcctcttccttgaatatttcatgaacaaattcacaatgtccctaaagttccgggcaccaaaaccgatattaaccatagacaagctagtaaaaaaggatttggtgaaaactatggataaaacttcgttaatcggtattattcttgcttttgtggcattgagcgtcgggatggttctgaaaggcgtcagtttcagcgcccttgcaaaccccgctgccattttaattattatcgccgggacaatctcagcagtcgttattgcgttcccaacaaaagaaattaaaaaagtgcctacgctgtttcgagtgttatttaaggaaaataaacagctcacaatagaggaactcattcctatgttctctgaatgggctcagcttgcacgccgcgaaggtctgcttgctttagaagcaagcattgaggatgtagatgatgctttcttgaaaaacgggctcagcatggctgttgacgggcaaagcgcggaatttataagagatattatgacagaggaagtcgaagcaatggaggacaggcaccaagcaggagccgctatttttacacaagcaggaacgtacgctccgacacttggagtactcggcgctgtaatcgggctgattgccgctctctctcatatggataacacagatgagcttggacacgccatcagtgctgcctttgttgccacacttctcggtatctttacagggtatgtgttatggcatcctttcgcaaataaattaaaacgaaaatcaaaacaggaagtaaaactgcgtgaggtcatgattgaaggtgttttatccgttttagaaggacaagcaccgaaagtcatcgaacaaaagcttttaatgtatcttcctgcgaaggaccgcttgaaatttgcagaacaaggagaggcgcaaaatggcgagaaaaaagaagaagaagcatgaggacgagcacgttgatgaatcatggctcgttccttacgccgacatccttactcttctcctggcattgtttattgtgctgtacgcgagcagctcgattgacgcagctaagtttcaaatgctctcaaaatcatttaatgaagtttttacaggcggaaccggtgtactggactactccagtgtcactcctcctgaaaacgagtcagacggcatcgatgaagtgaaaaaggaaaaagaagagaaagagaaaaacaagaaagaaaaagaaaaagcagctgatcaagaagaacttgaaaatgtgaagagccaggtggaaaagttcatcaaagataaaaagctggaacatcagctggagacgaagatgactagtgaaggccttctgattacgattaaagacagcatcttcttcgattctggaaaagcgaccatccgtaaggaagatgtgccgcttgcaaaagagatttcaaatcttcttgtgattaacccgccaagaaatatcattatcagcggacatactgataatatgccaattaaaaattctgaattccaatcaaactggcatttaagcgtcatgagagcggtaaactttatggggctcctgattgaaaaccccaagctcgatgcaaaagtgttcagcgccaagggttatggcgagtataaaccggtggcttccaataaaactgcggaaggccgaagcaaaaaccggcgggttgaagttctcattttgccgagaggcgcagcggaaacaaatgaaaaatagcaaaaaaggaagccttgtgacatatcaggcttcctttttttacttattatgaaactgttttgcgtttaatcctactctttttaacatttcggtgcacatctctacctcttcttcgcttaatacgctgatcatttcatcaatttcagcagcgtgatcagggaaaatatcgttcaaaagaccgatgcctttttcagtaatttgcgcaaatgtcactcgtctgtctgtaggagacgctttccgaatgagaagttctttttgctccagcttatctacaacgtatgtgatgctcccgctagccaagagaattttatctcctatctgctgcagcggctgatcgcctttatggtacaaaagctctagcacagcaaattcagtcggattcagcccatgcttatgaatatgcttattcatatgatcgttaatagaccgatacgcgcgcgacagcacgataaataacttcagtgatttttctgtcatgtctcaatcatccttttagaaaccgttacagagaaacattaataaacaaagaccaaaatgtcaataaaaatctttccaatatttctcttcttttttaaaatgtaagcttgccaacatctttttctaatttttttggttattttttcttattaaagaagaagaaacaatgatataatacctctaatcaggtgtatgttggagcgatgcaaattgaaaatactaaaaggcgcctgcgggagagtcaaactttatatcatactggtcgtgattccggcaatcgtcatcagctttttcgtatatgaaaaagaaaaagatacaatagctgcagaacataaacaagaagcaagtgtcctgctaaaccttcaccgcaacaaaatcaattatttaatcggagaaacaatggcgagaatgacctccttgtccatcgccatcgacagaccggttgatataaagaaaatgcaatcaattttggaaaagacctttgattcagagccgagattttccggtctctattttctcaatgccaaaggagacgtcaccgcaagcacaaccgaattaaaaacgaaagtaaacctggccgacagatctttttttataaaagcaaaggaaactaaaaagacagtcatttcagatagttattcgagcagaattactggtcagccaattttcacaatttgtgtgcctgttttggactcaaaacgtaatgtgacagattatcttgtcgcagctattcaaattgattatttgaaaaatctcattaacttactaagccctgatgtttatattgaagttgtgaaccaagacgggaaaatgatttttgcgagcggacaagcctctcatgcagaggatcagaaacctgtcagcggatatctggatgatatcagctggaatatgaaagtctatccgaacccggtcacaatagaagaactgtcgaaaagccttgtgcttccgctttcatgtattattgttctgctgaatatcctttttattctcgtgctgtattatttgctgaagcggcagacccagctggagcgctcagaaaacgaggcgcaaaaattagagctgatcgggacgcttgctgccagcacagcccatgaaatccgtaaccccctcaccgggataagcggctttattcagctgttgcaaaagaaatataaaggtgaggaagatcagctttacttctccattatcgaacaggagataaagcgcatcaatcaaatagtgagtgagtttctcgttctcggcaagccgacagctgaaaaatgggagctgaactcacttcaggacattatcggagaaattatgccgatcatttattctgagggcaatctatacaatgttgaagtcgaattacagtatctaaccgagcagcccttactcgtaaaatgtacaaaagatcatattaaacaagtgattttaaatgtagcaaaaaatggcctcgagtcaatgcctgaaggaggcaaactgacgatctccctaggagctttagataaaaaagccataatcaaagttgtggataacggtgaagggatttctcaggaaatgctggatcacatcttccttccctttgttacttctaaagaaaaaggaaccggtctcggccttgttgtttgtaaacggatcgtgctgatgtacggaggctctattcatattgaaagtgaagtgcgaagaggcacagaggtgacgatcaccctccccgtatccgcatcatagcccccctgaccatgtcaggagggttttttatcttcgtgatcgggcattgccattcgatttgcttgctggtcttccagaaaaaaggattttgatgaaacgcaacagcattttcaaaagcaaaaaaaacataaaaaatactaaaaaaccctttataccttccgtggcatctaaaaactccatattccctctccccgtcaccttttgctgaatctcaatcgcaaatacgatgacaatgatgactgtaacggtatagataaaggacaaggctgtcatactccatttagaaagccatgtaaacacagcgtgagtgacgccgaaaaagaatatgccaaaaatgccgatcacccaaaaatgcatttctttgtcagttaaatgaatgccaaatattccgcataaggaaataaaagcatcatgaaattgattgaccatttcggtaatgagaatcgccagttccttcattagttccctctttcatatgaattttttccagaaaaaaagagcgcttccgaaaagctctctctttatatatgcatctgataggccgctatttatttgcatcatatgctggcataacatctctgcggggccacaagcctaatttctttacaaggccttgaatcccttgggaatgttcgttttcttgcataagctgatgatattcatttattaaacaatccagctcctgactgtgcctgatcgtgtcatgccctgtaaatccctgctttctagcggcatctatcattaactttcttttttcatcaatagacaccaacaatctttcttgttcagaagaaccgcccattcacttcacccctcgccgctaagaaataggaaacaagtttgattgggttattgtgcattattacagattatactttatttgtaaacatattttcattaaataagttaatttttcaggtataatagatatattgataggattagaagaacaatacccaggtgaagaatatcttaaacacgccgccaggcaggaggtatgcccaatgaagaaaaagaaagcaataatgctcggagcggcaggcggaaaagcgattttaaagaggaaaaaccgaaaaaaatgtatccagcacatcactactttttttcagatgcttcgcgattggcgaaatggcgactaccctcgttcacaggttaaaacacttttgctgttaactgccgcaatcctgtatatcgtcatgccgctcgatatcattccagacgtaatcctcggtcttggattcattgacgatgcagctgttttaggtttgatttggacactgattaaaaaagaactgtcacaatatgaaaagtggcgtttgcaataaatataaaaagccccgttcgatgaacggggctatctcacgcttattgattcacgctgtctttttcataaataggaacccagccttcagttgtgacaaaaattctcaccgcgacaactttgcggtcctcctgaagcgtgaagtaatggcggatattctcaggcacggagattaaatctccagggtttaaacggacatcaaaaaacgtgccgtcctggccttgaatgacaaaaataccgtgtccgcttacaataaaacgaacctcatcgtctgtatggtgatgctctcttttaaagttttcaagcagttcatcaagtttcggattgctgtctgacaatgaaataacatcctgtgctttatagccgcggcgggttgagatatctttaatttcagtttcgaaggtatcaagaatttgctgtttttcttcttctgtcaggtcatatttctctgagagatgttccggaagcctcgtgatatcccattgctcataaataacctcttgactgtccagaaagcttgccacttcctcttgattttcaatcgttgtatttgcctcatcatgaattcgaattgtagccatttcaattcctccttttatttaaccagctgatgctcgagtgttttcaatttcaaatggtagctgaacaaaaattcatacgcttcaagcactctttttgcctcaaatgctgttttcccccaagccgtaataccatgatttcggatcagaacagctcctgaatcttctgaaatctcttccgcaaacagtgccgctagcgtcgggatatgtgccggattttctataatcggaacggtcacttctgcgttctcttcccacaagccgagtgcttttataatttcctggcctttgaatgtgattttcttttggtctccgtataactctgaaatcacattattgtttaccgtatggacatgcaggcagcatccggcattggttttattgtacaaatgtgtatgcaaaagcgtttctgctgacggtttcagagaatgcccgctttcagcaggctctccgttttgatcgaccagcagaaaatcttcaaccgtctctttgcgtttatcttttccgcttgcagtgacgagaaatgttaaaggctcatctgtaaccttaattgacagattgccgctagtcgccggaaaccaatctctctctgccaattcccgttttacttcagcgagctctcgccagcgttcttgttttgcagccattcctgtacctcctttacattctcaatttcctttctgatctcataaaaatcttgatacggaagatgattgaggttttgctcccggcattcgtttaataaataatcccttgcaaagcataggtcagacagctttgctgcctccacatctgtaaccgaatcaccgatcatgatgatatattggttcggttcagaaagttcatggatgaccgacggcttacagcacccgcattgattgctgcatgtgcccttgcaggaatgaggccagtcaatatggatatagtcattgtcaaatgaagcatggttgcaataaatgcggtctttctccacaatgccttcaagcaaaggatatacaaaaaagtccattccaccgcttatgacataaaacggaatctcgtgctcattgataaatgctacaaattcccgaaagccttccctgatttttgcatcttccaatacaaaacttgtaatctcttcttttaaactgctgggcagaaggccgaacatccgcccgacaccttccttgattgacagcgttttggaaagtacgccgtcttttaatgccatccactctgggggagcaaatgttttcatgatatttataatgttgtcgttcatcgtgattgttccgtcaaaatcacaaataataaaaggttttcgagtcgtcatacggcttcagcctttccccatttatctagcgcaagcttaagatccttgcattgttcggctttttcatcaatcggctgggcctctaggaccgcatcaataatagctctgaacgctcgccccccgccttgggcaccgttcggatgtccatgtacgcctcctccggcgttaataatgtggtctatgccgaaatcacgcattaatagcggaaccatgccgggatgaatgcctgctgacggaacagcaaatgtttggttaaaagcatcctctctcacacattcttcatgaatcgccagtgcatctgctcttggaagcgcaaccgaaccatatggagacggaaagaggctgaagtcagcaccgcaatatcggtttaattttccgagtaaaagagcgtgagaaaaaccgtaaaacggagaagacgtaaacgctccgctcactgctggatgcgccataatcggaactgggatttcaggatcttctgcaaggccttgcataacgtccaagccgtaagcgaagacattaaacaaaagcgcatccgctcccaattcggcggcgcgtctcgctttgtctttcagatcagccgtacgtccggtcaaattcaccgcatacagcgttttatgtccggtttgttcatacgtttctttcaatatttgctttccttctgcaattcttgtttcaaaaggcgctagaccagtctcaaagaaaatttcatcgtctttaatcaagtcaactccgccaagcgcctgctgccggagctgttctttaatatcactcaggtcccttccgattacgcctttaaatatgctcattaacagcggtctctcaaactctcccagcagcttccggatgccgtatacgccaaacttcggtcccggcagtgcacgcttaaatgcttcagagaagtgaagatcgattaatttgatttttccgtccagggacagcttgccaaacactgttgtcagcaaagccggaatatcctgagagaaattgatttcaggataggcaattgtgatgaccgcttgtttttctgatgcagcagttccctctctctcctcaacttttatcacccgccccttgtgcttttgcatttgctcctgttttacaaggggcagatcagtccaggagcctactgtcaatcctgttgcgatttgttctgctttcttctctgtatcggctcccggttcggtcaggagatatgtcgctaataactcactcatgccagagctcctttcattttcatccatatcaaaaaacctcttcaaactgcaatcgcgtctaaagaggtttcgtttctcgtccgaatcttatctctcagccgctagctgcaagaattagcaccgtgctttataagtcggttgccgggcttcatcgggctcgtccctctgcctgctcttgataagaaaatatagattttataaattattttgaattatcccatcgttataaggtcttgtcaatgcttttttgggtaaacaggttcagtttgccaattcgataagcggcttccttaagtctttcttcacttgttaaaagtccgactctgacgtagccctcgccatattcaccgaagccgtttccagccgcaactgccacattcgctttttccagcaaaagatctgagaactgctcagaagtatagccttcaggcacaggcagccatgcaaaaaaagaacctgcgggagctgttacatcccagccgatttcccggcatgccgtgatccaagcgtttctcctgctctcatacctggcattttgctctgccacacacgtctgatcggctaacagtgcctctgctgcagcctcctgagtcgctctgaaaagactgacaaacatatggtcttgataaagattgatcgcttcaatgaccgaagcgtttccgacggcaaagccaacccgccatcctgccatattatacgtttttgacagcgtgtaaatttcaattccgatatccttcgcaccttcagtctgcaaaaagcttaaaggcttgcagccgtcaaatcctacagcgccgtaagcaaaatcgtgaacgacgcagattccgttttcagccgcaaaacgcacggtatcttcaaagaactcggaagtagcaacagctccagtcggattattcggataattcaaatacatcaatttcgcctgttcccttatttcagcggttatgctgctgtaatcagggagaaacgctctgtcctttacgagcggcatcatttccatctttgcttttgcaagtgtgacacccgaccagtaatcaggataacccggatcgggaactaaaatcgtatcaccgggattcaacaagcattgcgggagctcgactagaccggcttttccgccgaataatacagcgacttcggtttccggatccagatcaatgccgtattctcttttgtaaaatgcagcagccgctgacttcagacggtatgagccgcgaaaagacgaatatttatgattctcaggatcagcgacagctcgtttcatctcctcaacaatatgctcaggagtcggctgatctggatttccctgtcccagattgataacgtcatgtccttctgcaagctttcggttcactttctgcaccagagaagcgaagaattgtttaggcaattccttcaatacatgagactgttcaaatttcatctattctcaccttctaaaaaaatcttgaaatgatagtccatcatcatatatggttaaatgaaaaaagtaaagaaaaatttggggtgttaaaaagatgaaatggacgatatcttgtcttcaatttgatatttcatacggaaaaccttcggaaaatataaaaaaggctgaatttttcatcgaaaaagaaagcaaacatgctgatgttcttgttctgcctgaattatggacgaccggatatgatctggccaatcttgatgaactcgctgacgaagacggccgctccgctcagagctggctgaagaaaacggcaaaaaaacatggtgttcatattgtcgccggatcggtcgctgtcaggaagaattctgatgtttataatacaatgtacatcgcggataaggaagggcaaatcattaaagagtacagaaaagcccatctttttcagctgatggatgagcatctgtatttatcagccggttccgaagacggatactttgagcttgacggcgtcaaaagctctggattgatctgttacgatatccgttttccggaatggatcagaaaacatacgacaaaaggcgccaacgtgctgtttatttctgcggaatggcctcttccccgccttgatcattggaaaagcctgcttattgcgcgggccattgaaaaccaatgctttgtcgcagcctgcaattgtaccggttcaaatccggataatgaatttgcaggacatagcctgattattgatccatggggacgtgtacttgctgaaggcggccgggaagaaggcatagtccgagcggaaatcgaccttcaagaaagcgcagaagttcgggagagcattcctgttttcgatgatatcagaaaagatttatattaaaaaatatattgacaactaactaaattacctgttaccatgttcatcaactgataaattagaattgtcaaacaagtgaatatattctcttatcgagagttgggcgagggatttggccttttgaccccaacagcaaccgaccgtaattccattgtgaaatggggcgcatttttttcgcgccgagacgctggtctcttaaggcacggtgctaattccattcagatctgatctgagagataagagaggcggacatagatgttaagcctccttctctctgagaaggaggcttttttacggccacatattaattaattacataattggaggttatgatgatgggagtcacaaaaacacctttatacgaaacgttaaatgaaagctccgctgtggcgttggcggtgaagcttggcctatttccaagcaaaagcacgctgacatgccaggagatcggagacggcaacttaaattacgtttttcatatttatgatcaagaacatgacagagcattgatcattaaacaggcggttccgtatgcaaaagtggtgggagaaagctggccgctgacaatcgaccgtgcaagaatcgaaagcagcgctctcatccgtcagggcgagcatgtgcctcacctggttccaagagtgttttattctgatacggaaatggcggttaccgtcatggaggatctctctcacctcaagatcgcaagaaaaggactcattgagggtgaaaactatcctcatctgtcgcagcacatcggtgaatttttaggaaaaacacttttctactcatcagattacgcgcttgaacctaaggtgaaaaaacagcttgttaaacagtttacaaatccagagctatgcgacattacggaaagacttgtttttacagatcctttcttcgaccatgacacaaatgattttgaagaagagcttcgtccttttgtcgaaaagctttggaataatgacagcgttaaaatcgaagccgctaagctgaaaaagtcatttttaacgtctgcagaaacgttgattcatggtgatttgcatacaggaagcattttcgcaagtgagcacgaaacaaaggtgattgatcctgagtttgctttttacggaccgatcggctttgatgtagggcaatttatcgccaacttatttttgaacgcactcagccgtgacggggctgacagagagccgttatatgaacatgtcaaccaggtctgggaaacgtttgaagagacgtttagtgaagcctggcagaaggacagtctggatgtttacgccaacatcgacggttacctcactgatacgctcagccatatttttgaagaagcaatcggatttgcgggctgtgagctgatacgacgcacgatcggccttgcccatgtagctgacctggatacgatcgtgccgtttgataaacgaatcggcagaaaacgcttggcgctcgaaaccggcacagcctttatcgaaaaacgttcggaattcaaaacgataacagatgttattgaattatttaagttacttgtaaaggaatgatctattcatgacccattcatttgctgttccacgttctgttgaatggaaagaaacagctattaccattttaaatcagcaaaagcttcctgatgagacggaatatttggagctgacgacgaaagaggatgtatttgatgcgattgtcacgctcaaagtaaggggcgctccggcgatcggcattacagctgccttcggactggcgcttgctgccaaagacattgaaacagacaatgtcacggaattccgccgcagactggaagacatcaaacaatatttaaacagctcacggcctaccgccattaatttgtcatgggcgcttgagagactgagtcattcggtcgaaaacgcgatttccgtaaatgaagcaaaaacaaaccttgtccatgaagccattcagattcaggtcgaggatgaggaaacgtgccggttgatcggccaaaacgccctgcagcttttcaaaaaaggcgacaggatcatgacgatctgcaatgccggctcaatcgcgacaagccgctatggaacggcgctagctccgttttacttggccaaacaaaaagatttgggattacacatttatgcctgtgaaacaaggcctgtcctgcaaggttcacgccttactgcttgggagctgatgcaggggggcattgatgtcactctgatcacagacagcatggccgcccatacgatgaaggaaaaacaaatttccgctgttatcgtcggagccgaccgaattgcaaagaacggtgatacggcaaataaaatcggcacatacggtcttgctattttagcaaacgcctttgatattccgttttttgtcgccgcacctttatctacatttgatacaaaggtcaaatgcggcgctgatatcccgatagaggaacgagatcccgaggaagtcaggcagatttccggagttcggaccgctccatccaatgtgcctgtctttaatcccgctttcgacattacacctcatgatctcatttcaggaatcatcacagaaaaagggattatgaccggaaactatgaagaagagattgaacagctgtttaaaggagaaaaggtgcattaaaaaaccgctggactttgctcatttggagccgagtcagcggtttttttgtttctttttgttaacattgatgatttcatctttttgagcgcttgataagatatgcagtttcacaaacagttcggcaaaaacggcaagtttctcagagcggctcggcttcaattgctttgtcctcctttttcatcagaccaacttttttaacttaataaaatgatatgtcggccgtgaaaaaagggaacgtgccatatgttttatttttctttataggagattcgctcgatgtttagcaaaaatgctttgatctccgttttgcttccggcgtatcctgttaacgcactgtttttgccgatcactctgtggcacgggacaaaaatcggcaggtcgttacgtttattagcctgcccgacagcgcgcaccgctttcggactgccgacagcagcggcaatatccgcatagcttcgggattcgccatatggaatcctctccagcgcttgccacactttttgctgaaaaggagtgcccttttggctgagcggcagggagaatgtcttcctttcgcctgcgaaatattcttgaagctgttgtttcgcttctgcaagattaggtgtttccttatgctcagtattctgaaccgtttctttccaatccacccaatcttcctgactgagaaatagacgagtgatccggtcctcctcttcggcaatgataagttcaccgagcggcgtttcggctgtcgtatagtagttcattcatcattccttctttcttcagcattctgtctgacaggaagcgtaatatggaaaacggtgcccttcccttcttcactttctaccataatctcgccttgatgttcttcaataattttatagcttaccataagcccaagtccagttccccgttcctttgtcgtataaaacggttcaccaagtcgctttaatttatcttctgtcattccgattccctcgtcttttaaggagattagaacatgatcttgatccaatgcctttatcgttacaaaaatatttccgccgtcaggcatcacttcgatggcgttttttaatatattgataaaaacctgtttcagctgattcggttcacagtaaatcgggggaatgtcgtcaattaaatcaagttgcatttgtacattgctgagattggcttgcgcatttagaaggtctatcgtgtccctcataatttgggtaacatgtttttcctcatacataatggcctggggcttggctaaaatcaagaattcggtgatgatggattcgatgcgctttagttctgaggtgatcacgttgaagtaaagggcgtagtctccctcgacactccctttcagaagctgaatgaagcctttaagagcagtcatcggatttctgatttcatgagcaataccggctgcgagttcgccgacaacatgaagggtatctgatttgcgcaggcgctcctccaattcttttcgctctgttacgtctttaaagatagccaagttcatattttgaataatattccgtttaaatgagaattcgagttttctgttatcaccgctgctcagcaaaaatggaatttcgttgtccatttcatcaaaattaatctgccttgccggtgatgccaaattttctatttcataagcagaaataatatctaacaggctgtgctgtttgatctcttcatgtgacaggcccaaaatatggcttgctaacgggttggcgtcgatgatcctgtattgattgtcgaacaatacattgccgtccattgatccgttgaacacttttctgaatttcagctcgctttcccgaagctccttttccatccgctttctgtcgcttacatttcttaagatcgtcaaatgctgattttcaaggattgtccgttttgaagtaaattcaagctctttgaattggccgttccccatttgaaacagcagctcttctctgatctctccgtattttgcgtatttcctcttcgttatgctgtatttctgctgcgagtcaacgagaaaatcacacagctttcttttcaacagcaaattcatcggcagctcaaaaattttacaggctgattgattcgcttttacgattcttccgtcattcgaccagatgatgatggcgtccattgcattttcaaagatttctctgaagcgctcctcacttttaaagagctgcagctccatagaccgcttctctgtgatatccctcataatggacatataaaaaccgctgatgatgtttgatgtaatcgtgaattcaaatagtttttgaactcctgaacgaagcttgacaggcagctcccccttcgcttttcccttgcggttgagcgccttccagatattgtcgaaatcttttcgtgagccgctgtctatgaactcatacaaagataaatgagacagctcattatgattgatttcaaagcttttacaaaaggacaaatttgcatcaataaaaccgccatctttatcaaacaggacgattccgtcaactgctctgtcaaacaagtccttaaaaagctgttcattcatagagaattcccgctccagaatcttcttagaagatatgtccctcatgacaacaaaaaagaaatcctcaccaatacctcttttggccagaaactctatgtattttgttgccccgcaatcaagcctgatcggaacctccttccacagaaagccttttttaaaaaacttctttacggaaagattcagttcatcctttgggattgaaaacaaaaaatccaaaacagaacgctttttcaaatcttccgagtcaacttgaagcatcctttctgttgcttcatttgcctgaacaatccgcatttcgttatcacaaataaaaatagcatcgagcgtattgttgacaatcacttgatgctgattcaattcctttttcagtcgcgcgttttcttctttgaggcgattcagttcctctcgcagctccgagtttgtctggacaccaagagtttccatgcatgtacactccttcttcaaaacctatccctcaatatttctacaaaatgcgggaacttccttcatttgccctataaatttcagaaaatttcagcgtcattacattacgaagacattttctacgatccttaccgtcactttacatcgacctaacaatcagcatttttttagattcctttttcatcttttattttaaaatatgtaccagcagggaataatctcttagtgactgatgaaagagaaggtgatgctatgagtaaatcgcgggacagttatttcgataacgcaaaatttttattgatattccttgttgtattcggtcatatccttcgttcctttattaatgataatcattttatgctctacctctacaagttcatttacacattccatatgcctgcatttattcttgtatccggttatttcgcgaaaggctttaaacgggcgggatatgtaaaaaagctggcggtcaagctgattattccgtatttgattttccaaattatttattccgtcttttattacattatgcaagatgaaagcatggcaaatgtgaacccgattgatccgcaatggtcgttatggtttcttgtaagcttattcttttggaacctgctcctatatcctttttcaaagctttcaaagcagtgggcgctgtttgtcagctgcggaatcgccgtgctgatcggttatctggactttgtcagcagcacgctgagcttgtcacggacattcgtattcttaccgatgttccttgtcggtttttatttaaataaacatcattttgatttattgagatcaaaacgcggcaaacaaattgcgctcggagtgcttgccgcagtattcgtcatctgctggggcatcgattttgactattcttttctgtttggttcaaaaccgtattcttcatttggagacgttaccctggtaagcggactatcccgaatcggctggtatgtactcgcctttggggcaaccttcagctttttagcgctcgttccgcaaaaacggtatttctttaccaaatggggaacccggacattttacgtgtatctgcttcacgggtttattattaagacattacggcaggtcgggcttgaggattggcttactgactatcaaagcttagtgatcctcttgcttttaacagcagccctgacatcagtcctctccagcaactttgttaagacagtcgctcagccattcattgagctgaggatgacaagcttattgcaatttgtcagaggaacgggcaaaaatgcttatttaaaatagaaaaagcacctcttaagcgggacgccgcctaagaggtcttttttattgttgttttttgtttttttcttttttcttttcaggcttggtgacttccagcgtttcgatgatctttccggcattgtaatccccgagttcacttgagaattcttcctccagcacctttttattcataggctttttatgattttgcatgtctctgctatgacggtttttcttcacaattacatgcctccctgctggccctgtttggaattgcggtttgcccctctaaaattggggtcgtcatgatattgtgtcttatatgaattggggtccatgctctcggtaggtgtattgttatttttaatggcttcattcacttcagctttacgcttcatacgaatcctcctcgccaattttcagacattttaagatgcaggagcgtaaattgcacctgtcggagttaggttctccaactgaacaggaggcacacatcttttttttggtaatcaaaaaacaccgcaaaatatgcggtgttttgcctatccgataatcactctttccttcggatagtgataattcgcttcaatttcctttcttccgatcagatacaggaaggtcaagatgccgattcgcccgataaacatgacaatcataatgacgcattttccaacactgctcaaatctgccgtaattccaagcgataggccggttgtaccgaatgccgagcacacttcaaacaaaagctccagcagggaatgtttttctgtaatggtcagaatgagtgtcgcgccaaaaacgagcaggatcgccatcatcgtgacaacaagcgacttcatcaagtcagcagggtgaagctcccgtttgaatacctttacggccttattgccgcgggcaaaatgaaacagcgcaagaaggttcaaagcaaaagtcgttgtccttatgcctcccccgactgagcttggcgacgctccaataaacatcagcgcacaaataaaaaagagtgtggaatctgataattggctgatatcgattgttgccagccccccgcttcgggttgccgttgattgaaacagggacaaaaacaaaatatcatgccatgattttcctgcgaacgcatggtttgcttccagggcaaagatgccaatggctccaaacaagacaagtgagccgaacgtaatcgtcgtgatctttgtaaaaagcgtaaatggataacgccgatgctttgaaaacaggaaatcctttacttcaacaagcacgggaaatccaatcgctccaaatataattaaaagcattgtaataaactgcacaaagtaatcgtggcgaaatggaatcatcgaattaccggtaatatcaaatccgccgtttgtcgttgcactgatactggcaaaaaatccgtgtaaataggcttcctgataggagtcatagtaggttaagaaatatgtgccgagtatcagcccgccaaaaaattcaatccacaagatcagaaacagtacctgcttcatcagattgacaattcctgaaaactgggattggttttgatcaaccataatcagcttccgttctttcagcccgattcgttttcccatgatcagccaaatgaacgttccgagcgtcataattccgattccgccaaattgcagaacaaatgctaatataaaaatccctattgtgctgaatgtatcagctgtatcaacaactgtcagccccgttacactgactgaactgacagctgtaaaaagcgcatcaataaacgtccaatccgcccccggtttatgggccgccggcaaactcagcaatataacggccacagtaactgcaagaaaataatataatgcgatcagctgggccggtgacaaggcctgtatcaattttccaaactttaatctcatgtaaaatccttctgcctctctttttaagtacggtaattattctaaagatattaggtccatttttaaaggcttttacgaaacattttcttaacttgcttatttttttatgattttagtcaatggataaaataaaaaacctctgagaattctctcagaggaacaatgtgtttgtattatttagcttccagccgtctgattcgctcatctaaatcaggatgagtagagaaaagtgaagagcgcttcttgccattaatctttaacgtttggacagctgtctgatcgtcttccaaaatccgggaagaatagcttttaagcgtccgcagcgcatgaatcatcttgtccttgccggcaagatccgctcctcccctgtcagcatggaattcacgatggcgtgaatacgcaaacacaaccaggctgccaagtatcgaaaagacaatctgaaaaataatcattgcaataaaatgaacgatcggcgctagatcttctttgacaaaacggcttgctatccaagcggcgatacgcgataaaaagacgacaaaggtattaacgataccttgtaaaagcgtcattgttaccatatcaccatttgtgatatgcgcgacctcgtgggcaagcacaccttcaactgctgcgtcatccatctgctccagcagccctgacgatactgcgacaagtgaacggcgttttgacggtccagtcgcaaacgcgtttacttcaggtgaacggtaaatcccgacttccggcattttcgttaaaccggcagagcggcttaatctgtgaacacgatcaaccaattgctgttcctcatagctgagcgagtgttttttcggattcagcactctgacgcccatcatcgtctttgccatccatctggatatcgcaagagacgtaaaggaaccgacaaatccaacgactaaactgaacacaagaagcgccattggatcgataccgccatcagctgtaaagtacgtcccgactcctgtaacagagcttaaaacagacaaaacgatcccgattgttgtaagcaccaaaatattcgttagaataaacagaaaaattcttttcgccataacaacctccgttattttaagttcaaaagaacccgtatatttaaattataaaacatccatttgaaaatgcaaggaattcgacgtatgatgttaatgtaatttgctgacgcttgaattttgaacttatacatagacctatatccgcgtcaaattgtttaaagaggtgaacaatgaacatttttaaactctctcgaaccgatatggtgcggctgctctattccctaaaaggacaaggagaacatagcccgctcgacattctcgtccaatcagcgaacatgtcagcagaaaaagcagccaatcatctagaaattcctgaatttcttacaagatacgaacgaaaaaaacagaaaaaagaatacggtctgtctacaaatgaaatcgtagagcttggcaacttatgcgagctgacttcgttaaagtcaaccgcgattcaaaactgggtaaagcgtgatatcaaagatctgatcggacaccctgagctgggcaaaaaatactcaattgaacaggcagttattcttttaattgtacgtgatttaaaatccatttatgactttgaacacatacgggctattttaaaagtggcctttaacacaatctcagacagatctgatgatgtcatcagcccgattgcttattatgaaagctgcgcatatgtgcttgatgccatccatcaccaagatactccttctatgaaagaatcaaatctgcaggagatcgccgaacaggagacagagcgtctccgtcaccgttttgaagaactgaatgacagccaatggcttaaaatcagacagattatcgccattacagtcctctccattttgacattccatattcaggcaaccgcacataaaatgacagcagacattctatagtctgcgccaccccggctcagaggccggggttttatttttctccacaacaattgccagcataaataaaccccgtatatttcaaactaaatacgcgttaagaatttctttatcgaaaaaggagatgaaaaagatggcgagcagaaataaactcgttgttccaggggtggagcaggcactagaccaatttaaactcgaagtggctcaagaattcggtgtgaaccttggttctgatacagtcgcacgcgctaacggctctgtaggcggagaaatgacaaagcggctggtacagcaagcacaatcacaattaaatggcacaactaaataaattcaggtctttattcgccgggggcactcggcgaatcttcatttttagctgaatgattatcactgctgtagccgtttggattacgtcggtctgaagcgttatcccttctggacgaagaacggttcttgccttgttcaccattgttccagtccctgtgatattggctttggcccttgtcagcgccgttattttcatttcctttatcttgaggatcttgtattggggtttgctcatggtccccatctttttcggtatttgtgttttcatctgattcctttatttttttatctttgtcactatcatcaatctggtcatccgctttctcttctttctggtctccggaatccgcatcattcagctgttcattatctccttgcttgctgtcctgggtgtcagtttgatcggtgttttcatcctcattttcatcactcttttgatcctcttccccggatggtttgctggagtcatcttttatatctttattgtcattcttttcatttgatttgatgtagctgcctgttgagacgccttctttcttcgctttttccctcgtttgcatatctgactcgagagattccatgcggtatgtcgttttatatttttcagtcacatcattcagctgttttttcacagcctttttatatgtattgtcttctgtgttttcataaacagtggaaatcaatatttctttcgatttttttacatacccgtgttcactgcagtcggttataatatcgtcaatcacctttttaaaatcagtcttctcccaatcatctatatcattcacgactttctgtccctcatcgtttagaggcgtcagttcaatcacttcataatcgctgtttaacgccatttcgacgcttggattgatatcgattgtcatatacgcataggccttattattagaaaaaacggggagaactataaaaataaagagcataatagcagtcatcgtaaaaatccccattttgaaagggcgcagtttaaaaaaatcaaaaaagctggcccttctgcccatgcgtgtttcactcggaagcatgatttcttctccgatttcatagctgtgtcgatcatttttggcttttaaaaattgtccgtcaggggtcagcaacgtgacgaattttttatttttctctactataatccctcttctcatgagtgcagcacccctttaagataatcttttaaataaatataatcacccgtaatgataatacacatcgcaataatatattttctgtttctctcaatcgtttttcggcttacagagacaagctgttcaagctgtttgaccggaagctgcttctttgtatacaggatagcggccaattcttcatgttcaacaagcgtcattgccacctttatggcgttttgccttgcatccgtgtgttttggagaattttcaagcagttctttaaacgataaaccataatccttgagctgcttttgaaaatagaggatttcctcccgcctctgctcctgttcaatctgacggcggtattcatcaatggaaagctcggcttcaatcaggctttgtgatgactcctgatcgtctccttcctgtaaatcgatatttatattttgtgcgcttctggcttcttttctaatgtaatcaatgacttttctttttataataagctcagcaaatgcgagcagagaatttcctttttcaggtgaatatttttctatagcttcattaaacgcgatcagtccaatactgaactcatcgtctttttcatctatatatcgtttacaaacggatgaaaccgtctttgcgataaatggcttatattgctgtattaattcattttgcagatctttattgcctttttgtatactctcaacagctttttcaagtgtttgcttcttttttcccaatttaaacaaaaggctaagcactggtttcacctcagttcctccctataactactcattaatgatagctaatttgatagggattcgcaaaggagaaaaagaaatattgatttccaatgtctcaattatgacaaaccattctgacgttctatacatgatttcgtgcctttctaaagaattaagggggttttatgcgtgttttttgtaacaaagatgttataaaaatgttattttatttcgcttatgaaaacgcttcaaacacaaaaagactctgcttttaagcagagtctttcagattacgcccgttcacgggtgctgtttttttgttcgttttgtgcaccctccggctgttttttcccacctgacataaaccagccgcaaaccgcgattgctgctaagacaccccagaatatcagcttccatgttccagaatggataaagtgctcagaaacaaccgctatgtcgcgatgggcaagcgtatataaagcaagcttcactccgacccagccgacaatcacaaaggctgctgtttctaggcttggacgttcctttaataacttcacaaacatggaagccgcaaaccgcatgatcaccagtccgatgataccgccggccaaaatgacgagaaattgtcctccgtcaagtccgccgatcttcgggagtgatgtcccaggaagtgtaaccgccagcgctactgctgctaagatggaatcaacagcaaacgcgatatctgccagttcaacttttaaaacagtcggccaaaaaccgctttgcttcgtctctttatgtgtgtcttctttcttaaatacatatcttttcaataagtggcttgctgagatatacagcaaatagatcgcgccaatcgcttgaacctgccatacgttgaccaagaaagaaattgcaaataaagagccaaatcgcagaacaaaagcccctgccaatccataaaataacgctttttttcttttttcctccggcaaatgttttaccattaccgccataaccagcgcgttatcggcggctaaaatcccttccagcccgatcaagacgagaagaacccaaccatactctaataataatgctgcatccataaatgataccctcccaaaaaagttgttttctttctcttcatccgatcttatgccggccggaccatgcaaaaaagacctttgccgacataaggcaaaggtcttgctagacatgaattcaggcatgccaacaaagccgatggatacaatccatgaaatgacgactttgtttccggaatacattccggacgctactcccctttgggatttcaagaaatatgattttatacgtcaataatatgcgcagcgcagtgatttgtcaacgtttatttttcaaaaatacagataattgttcggagtgcgtgcgtttcttcctctttttcatcagtaagtagagcaggaacagcgccaaaatcgctatcccgatcggaagcatatattgatcaagaatagagccgactgccttccaattttcaccgagcttcacaccgagataaacatatacaaatgtaatcggaagcatagcaatgaatgtataaagcgaaaacacccaaacattcatttttgcaattccgcacggtatggaaatcaatgtcctgataccaggcaagaaacggccgctgaaggcgacaaagcccccatgttttttgaaaaaattatctgacttatcaagcgcttcaggtttaataaagagatacttcccaaaacgttcaagaaacggccttcctccgtaccggcctatccaatacagcgtaagcggaccggccactcctccaagcgatcctgccaaaacaacgccagcaagtgtcatatcgcctttagatacccaatagcccgcaagcggcaagacgacttcggccggaataaactcaatgctgagcgctagaaatattccaaaataagataagcttttaaatgcttcaatccatgacataaccagctcttcgatagccaccaactcccttgtttcatgtttatgtatcatacatttttctcttttcggaaaacatcaagatgattttaacacatttttcacggtcagttgaactaaaaatagatctccctcgtatttctatcgttttgaaggctgaaactctgcggttaagcagccgataataaagagagtcaacaagactggaacacacgatacggggggaatctccatttggaaatacacgttacatataatacgactctcatatgtttatctattctaattgcctgtaccgcctcgtatatttcccttgaactttcaaggaaagtcaccatcaatacaggcttaaaaagtaaaatttggctgatcggcggctcacttattatgggattcggtatttggtcaatgcattttgtagggatgatggccgtccatatggaaatgccgatggaatatgaattcatgcctttaatggcagccattggcgcatctgtttcgggatcatttgtgtcattatattttgtcagccggcacattcttacatattacagactgcttaccggatcagttgtgcttggcgcatctattgcttctatgcactatatcggaatgtctgccatttcccgggtaatgattatttacgaacctattttatttacagtttcaattatcattgcgattgcagcctctttcgtctcgttaaaaatattctttgacttggccgtaaaaaaacattctgagcatcttatattctataaaggcgtcagttcaattgtaatgggcattgggatttcgggcatgcactacacagggatgcttgcggcaactttccataaggacatggctccgcccggaagccatatggaggtgcaaacgtttcattggtcaatttttgttactttaattattttttgtatccaaacgttattgttattcagttcccatgcagatcgaaagtttattaaacagagcgaacgcataaaggataacgaacagcgatttcagtctttaatcgtccacaatattgatgcaatttttattttatcattagaaggagacataatatcttccaatcacgctggtgaggaaatgatcagcaaatttggcttcagcatgcatgactggaggaattacacatcactgaaggttaagcgcctttttgagcaagttaaaaaagataaacaagcgatgaacagcgatagcgatcttatcactgaaaaaggccagtttcacttaaatattacgcttatacctgttgaggtcaatcaggaactagacagcatttatgtcatttgtaaagacatgacgaagcagtacaaagcagaaaaagaaatccatagaatggctcattatgattcgcttacagacttacctaacagaaggcatgccatctctcatctaacaaaggtgctgaatcgcgagcattccttgcattataacactgttgtattctttcttgacttaaaccggtttaaagtgattaacgatgcattagggcataatgtcggtgatcaattgcttcagtttgcagctaaacgcctgtcatctgtagtccctgataacggatttatcgcccgtcttggcggtgatgaatttattattatattaacagacgccaatacaggaacaggcgaagcagatgttttagcaagaaaaattatccaaaaattcaaaaaacctttcaaaattcaagatcacacccttgtcacatctgtcagtatcgggattgcgatatctccaaaagacgggacggatggccttgaattgatgaaaaaggctgatatggcgatgtatgcggctaaagaacgaaacaaaagcaaatacagatactattctttttcaatcggcaacaaagaaaccgttaagcttaaccaagagatggtactcagagaagcaatcgaaaacgatagatttgtcttgcattatcagccgcaattcagtgtgaaaaaacaaaaaatgacaggagcagaagcactgatacgccttgtgacaccagacgggcaactgcgtccgcccggagaattcatcggtgttgcagaagaaacgggacttattattgatatcggaaagtggattatagatgaagcatgcaagcaggcaaggatttggcatgacaaaggctatgatctttctgtcgccattaatatttccgccagacagtttcaatctaaagatctgattcccctcatcaaggatacgcttaataagtaccagcttcctccgcagcttcttgaagtggaggtgacggaaagcatgacaatggacaatctcaatcactccaaaaaggttttgtcatccctaacagaattaggaatcagaatcagtattgacgatttcggtactggtcacagctctcttagctatttgaaggacttcccgattcacaggctgaagattgacaaatcatttattgacgatattcagacccatcctaaatcagagcaaattaccggagctattattgccatggggcatcagctgtctttgcaggtgattgccgaaggtgtggaaaatgcagctcaaaagcagcttctttttgaaaaaggctgcgaccatttgcagggcttctttttcagcaggccaatacctccggaacaattcgaacaattcattattgaacagccgtcgcaataacagcgccggctttttttcacccataagttactacacatgaatcgtactccttctcttcacactaaagaaaaaaaggggtttatcgatatgcatacaatgtggaagggatcgatcagcttcggattagtaaacatccccatcaagctatatgcggccacagaagataaagatattaaactgcgcagcctccataaagaggatcacgcaccaatcaaatacgagaaagtttgcacaaattgcgaaaaaactcttagtcctgatgaaattgtgaagggatatgaatatgtaaaaggaaaatatgtagtgctgacagacgaagatttaaaaagcttaaaacaggagcatgaggagaaagcagttgagattgttgactttgttcagcttcaggaaattgatccgatttattttaaccgctcctactttgtcggccccggggataatgggacgaaggcctataccctgctgcgtgaggcgctgcgctcaaccggaaagatcggtatcgccaatatgacaatcaggtcaaagcagcagctggcgattctccgcgtttatgaaaattgtatcgtcatggagtctatccattatcccgatgaggtcagaagcgccgctcaagtcccaggtgtacctgatcaatcgaatgtaaacgataaggaactgcaaactgctatcacattaatagatgaactgactgctaagtttgagcctgagaaatatgaagacacgtaccgacaggcgctgctgcaaagagtcaacgacaagctagaaaataaagaaacggctgtcactcctgataaagcgccacctcgtgaagatgtcattgacctggtaagcgctctgcaagccagcatcgacagaaccagaaggccgaaccgggagacaccggctgccgcacctgcacaagccgctgaaccgaaaggagccggagataaaaaacaaaaaacaactagaaaaaaagcctccggcacatcatagcgcatggcgtttaccatgcagccggtcttaacttcgtcaccgccaatcggagcagaatggcgttacgaagtaaaatatgatgggtaccgctgtattctccgcatccattcttcaggtgtgaccttaaccagcagaaatggtgtggagctcagcagcaccttccctgaaatcacacaattcgccaaaactgcctttcagcacctagaaaaagagcttccgctgacacttgacggtgaaatcgtatgtttggtgaatccctgtcgtgcagattttgaacaccttcaagtgcgggggcgtttgaaaaggccagacaagattcaggaatcggcaaacgcgcggccgtgctgctttctcgcctttgatttgttagagcgaagcggagaagatgtaacgcttctttcgtatttggaccgcaaaaaatcgctgcgtgaactcatatccgcagcaaagcttcctgcatctccagatccttacgcaaaagaaaccattcaatccattccctgttatgatcattttgatcaactctgggagatggtaataaaatatgacggagaaggaattgtagcgaagaaaacaaacagcaaatggcttgaaaagaagcggtcgtccgattggctcaaatataaaaactttaaacaagcttatgtttgcataacagggttcaaccctaacaacgggtttctgacggtatcggtgttaaaaaacggaataatgacaccgattgcctctgtctcgcacggaatgcgtgatgaggaaaaaagcgctatacgcgagattatggaacagcacggacatcaaacaccctcaggcgaatttacgcttgaaccttcgatttgtgcagctgttcaatacttaacaattctccaaggcacattaagagaggtatcgtttatcggtttcgaattccaaatggactggaccgaatgcacgtatgcgcaagtcatacgacactccaaaccggttcacccaaagctccagttcacaagcctggataaaatcatatttgaaaagaataaaaaaacaaaagaagattttattcagtatatgattgaagtcagtgactacctgctcccatttctgaaaaaccgggctgtcaccgtcatccgctatccgcatggatctaggagcgaatcatttttccaaaaaaacaagccggactatgcgccggattttgttcagtctttctatgatggaagccatgaacatattgtctgtgaggatatgtctacattgctatggctttgcaaccagcttgctttggagtttcacgttccttttcaaaccattaaaagcaggcgtccggctgagattgtcattgatttagacccgccttcgcgagatgactttcttatggccgtgcaggccgcaaatgaactgaagcggctgttggattcctttggcatcacatcgtacccgaagctgtccggcaacaaaggcatccagctttatattcccttgtctcccgaggcatttacgtatgaagaaacacgccaatttacgcagctgatcgcagagtactgcaccaatgcatttcccgagctctttaccactgaacgcttgattaaaaacagacactgcaaattgtatcttgattatttgcagcatgcagaaggaaaaacgattatctgtccctattcaacgagaggaaatgagcttgggactgttgcagccccgctctactggcatgaggtgcaatcatctttaacacccgctctgtttacaattgatacggtcatcgatcgaattaagaagcagggctgcccattttttgatttttaccgcaacccgcaagacgaaccgcttagcgctatattgcatcagttgaagaaaaagagctgactaatgaagtcagctctttccgtgtttaactgtactttttttctaaccgctctttttcctggcgctgaagcgggctcagctgttcattatacaaatcaatatcaatcgcgtatttcggccgtcttttcacttcagaaaaaatcgttccaatatactctccgatgattccaattcccatcaattgcagcccgcccaaaaaccaaatggatatgataagagacgcccagcctgcattcgtatggccgagcagcttttgaataaacgcgccaatccctgccacagcgctgaggaaaaacaaaacaaaccctaaaagcgtaaagaatcgaattggtgcgacactgaatgaagtaatcccgttaaaagcgaaggatagcatctttttcagcggatatttcgttttgccggcaaagcgttccttgcggtcatacaaaacttcggccgatttaaagccgatcatggggacaatacctcttaaaaacagattcgcttccggataacgctcaagctcttcaagggaccttttattcattaaacgaaaatcagcatgattataaattaatttaatcccaagtttattcatgagacgataaaaccctaacgcggtcgtgcgcttgaaaaaggtatcggtttttctgctccggcgtacaccgtaaacgatctcgcagccctcatgatatttcagcataaaatcccggatcacagagatgtcgtcctgaagatcagcatcgatcgaaatgacgcagtctgacctattcttcgctttatgcaatccggctaaaagcgctttttggtggccgacattgcaggctaattttaagccggtaaccttcttgtttcttatgctctccatagcaatcaaagcccaagtgcggtctttgctgccatcatcgacaaacagaattttactgtcttcagcaattaatttttcttcaattaaatcatctacaacctctgtcagctgatggcttgtttcttgaaacacttcctcttcattgaaacacgggacgacgatggttaatactggctgtgactgtttcaatcgatatcctccttatcttgtttcatataaataaatgcgccaggcggaatctttatggtcaaacgtctttacgagcgcgagatggttttgttcagcattcatgatcggaactgaagaaaaaatgtaccgtccacccatttttttaaatacatctgtatttaattgaaggttgttgatcgttttcttcgagttctttttgaaatcatatcgtttaccgagttcatcgacaaaaaggtagcagcggctgccccattcatcaaagtattgtttcagccgagaatttttttccagctctttttcgatgatttttctaaattcatatttatatgagagcggatacagattgttatacgtatctaacgtataaaacccgttatattgggcgatagacggatgcagtccgatgctcgccaccctatacgaatcttgcggacgtccgatatattccttaatctctttgaattgctctgatgcataaaactccctgaatgtcggcgcgttgtaatgaacaccatacgtatattcttcattaaaaggcgccaacaccatcagctgtgcagcgactgcggcgtacacaagccatttccatcctttccccatccgccaaatgagatataaagcaagcgcaaagctcacgtatataacaagcggccgaagaaaatgaaaacgggcaaaattaaattctgctaaaaaagcaaatttctgctttggaacagcccaaattttgttgaaccaaaacgcataccataatgacaacccgtaattaagcacacataaaaacagataaacattttctggctttgtccgatttcgtttgaacagcagagcagcaaatacgaccatcaggatcggaaggatgacaacggtatgaacggtcatcacatgattatggccatagacaaagttttttatggatagtcgaagagaatgccaaacgtcatgcctagatgagataaattcgatacgatgcatcggtgcgtgctcaaacagcatcgaatagacaagccgatattcaacgaaaagatagatactcgtcataaatgcaatactgcctaagaacatcaaattccatcttctttttgtaatggcatcatacagccaaaaacacgccatccctgccaggaaaaagaagaagcctagaacaaagcttgagtatagagggagcaagcccagcgtcagccactctctccatgagatatccccttttcggatatttaaaaaagcccacagtgccaaagggtacccaagcgtactcagcattcccgaaggccagaacggtgttaaggcaaatgcaagcgatacgccaattcggatgaaagccgcttttggttccgggattatatgtttcttcagcagcacatacattccaaaaaaagcgacaactcttgtaaccgtctggcttattgcataggcggtcatggaagaaaagaaagcatggagccaaacaattccgctccactcggtgccaaaggcatcccggggcagcccgttaatgatttgcggaatggcagcgtcaaccttgccgacgatttctccgctatcggccagaaccttgtaccaagcgatgttggaatctaaattatcgtggacccggatatgggcatcttcctttaaaataaaaagcggggatacatacaataaaagaagaaataatgcgatccagagataatatgtttcttttttttgttgtctcatcaatcgtaacattgcttacacatccatttgttattctgactccgtcggcatgttctgcctcatgtgtcaaaatttattatcccttttcccttccaaatcattcatcatatgacaatccgtttttcaacctgtctctacccattaattcccgctatccatagggcttgatcacttactatactgatagaagggaggggatatattttgtttacaatcttactttcattggccatactcgtatttgtgccatttctatataaagcgaaccgcaatacaaaagatgtgaaagtcaacaccatttcaatcgaccaaaaagacggccttccagccagaaaaaaattaaatatccttcatttatctgatcttcacttggaaaacatttcagtctcacctgaggagctgtatcatttaacaaaagatcagcctgtggacatcattgctcttaccggggattttcttgatcggaaacgtaatattccgaaactggcaggttacttgaacgccttgcaaaagctaaagcctgcatatggaatgtacgcggtgttcggtaaccacgattatgtattgaaagaagaggactttcagagattgaagcgagttttagaggaaaacggctgtatcacgctgcaaaatgaacatgttcgaatcgagacggctgcaggaccagtcaatattatcggcattgatgattacagtacgaatcggagtaatatcaccggctcttatcaaagtctggaaaatggctatcatcttgtcttaacacatgacccaaatattattctggatatgaaagatgttcattatgattacctgctgtcagggcattttcacggcgggcaaattcactggccaaaaccgtatcatttggtgaaaatgggaaagctcgtgcgaatgaacatgattaaaggccttcattatcatcacgataaaccattttatatcagcgagggcttgggacaaaccggcgtaaatatccgtgtcggaagccgccctgaagtgacatttcatcagatttaatcaaaaaagactgtgctgaccgaggcatcagtcttttttttgataggttttctgcagcttttcttttgagataaacaaataggatgaattcggtaaatgccgcaagctcacaggctttgaagtcaaatataaaatcggcacatgagacacttttttaaagcatctgtaaaaagggttcaccggggtgatcacatcaaagccgagcctttccacacctttgtcaagcattgtaatcccaatgattcctttgattttctcgctttttttatgattgttgatatagtcaagaagaagcggcatcgattgatatactttctgataaataatgattccctttctgactgcgctctcaatgctttgcagctccctgatcagctttatgttatgcaggtggattttaacgagcacatcattttttcttatatgcgttccgtcgctaagcacgacatgatgtcctttgtacttcgtcagcctgactcgaaaaacgcttttttgatcgttgtcaatcaagcttagccttgaaaaaaagaaataaatcggatcaaccactctccatatggaaaggaaacaagttttcatcttttcaccttccttatgatcaaaaacacccttatattttgtgaacgttctcctcaaaatatagttgccatatttttttaggaggactgtcatgaaaaacattctcatttttccttttttaagcatttccaccggccatcatcatgtggctgatgcattgcaggctgaattagagtctcaagggctggcagctgaaaagattgatatcttttcacattcgtataggcggttagaaaaattgtcctccgtggcttatttaaaatggattcaatatttcccgaaaacgtacagcggcatttacaggctcctcgcctgcggagaatttcagcatgacaaacgctatttcatgtacgaatggctgttcacacagcaaatgaggcacatcctccaagaaaaacagcctgatatcgccttctgcacacatgcgctgccttcttatctgctgaaccgactaaagcctgaatatccgaatctgacggttgtgaatgtatacactgattttttcgtgaatcaattatggggacggaagaacattgattaccattttgttccgagcacggaagtaaagaagcagctaatatcagagggtatcgatcagaacaacatatacttgaccggcattccagttcaccaaaattttgaaatggaatcagcagataccttgcagcaccacccgccatataccatcatcatcacagggggcagtatgggggtcggtgggattttaaaatgggtgcaggaactgtcgccaggcggaaagatcttatacaaaatattatgcggcagaaacgaaaagctctactcctatgtcaaaagtttacaccaccccttgattgaggcgattccttaccttcacagcaaagcagagatgaaccgtttgtacgaacaggcgacaggcatcatgactaaacccggaggcgtgaccatcagtgaatgcttacagaaacggcttccggtatttatttatcatgcactgccgggacaggaggaaatgaatttaaaccttctacatgaaaggaaactcgtcacagatatgagaaactgggacatgcagaaagcagaagagtatatcgcggcattttttcaatcgaacgaacagatgaaggagtataaaaaacacgtcaatggataccttggcgaaatgtctgataggaagattaaagatgttttaaaaagaatcatatggaaacaaaaaaacactctcctgaaatagagagtgtagaatagttaacgaaacagcaaatgctggctgtgtatgcctgctttcttgagcaggacgatcagctggtcctgttcatcaggcgaaagacctgaaaacgctctcgcaatacgcagtgcatgaatcggataaattttatccaaatactcatttcccttgtcagttaaatgtgcgtaaacagagcgtttatctttcgggtcctgctcccttactaaaaacccgtttctttctagtttgtcaataacatatgtgacgtttccgcttacaagcagaagtctcgacccaatttgctgtaatttttgcgggcctcttgtgtacaggagttccagtacagcaaattcagtgggattaaaaccgtgctctttgctatcacggatactatgttcggacacacttttgaaagcccttgcaaaaactctgtacaaattcatcgcacgctcaacttcttcttcgttaaacgataatctcatcatatctacctcgtatataggatttttataaaaaaataatgaaaacccttacatataataagagttcagtcccttactatacgtattcgctataattcgagaaattccttctaaaagcaaaaaaatccttatacattatcttgtataaggataatttttatgatttgtaatgcttcgaaagaaataagcgtattctttccgaagctcagaaatcgtcattttgttcatgacctctttattataaacccctatctgatagagtttttcagaataatggcgtcgttctttttctaaagcggatttcaataaattactcatagcgtcctccttcattttgaggtatcctatacaaaagatactctttttaaatgaacgtggtatgaatctaatgtaaagaatttatgtttacgaagattttcggtattgtccgttttgaaccgatcttaataattgaaaagcctgttctccggcaagctgcataaacgtctccagcatttcatcacgcttgatatccaactctataatttcttttgccagtgagactgctttttcttcctccatgattatccttcctcctcgtttgattcgttacataaaggataaaacgcgcttgggtgttacgcattattcttgttaatttttcttccgtattttttcaaaaatcttctatttgatgttagaaaatatgacaagcgtcaggttttttctctttgttttttatatactattatcaaaagacatccaggggtggaaaaatgaccacagaagatcattcttataaagacaaaaaagtgatttcaatcggaattgtgagtgaattgacaggattgtccgtaagacagatcaggtattatgaggaacgaaagctcatttacccgcagcgttcttcaagggggacaagaaaatactcctttgccgatgtggagcggctgatggatatcgccaataagcgtgaagacggcgtacagacggcagagattttaaaggatatgcgcaaaaaagaacagatgttaaaaaacgatccgcaagtgcggaaaaaaatgctggaggggcagcttaatgctcactttcggtacaaaaaccgttaaataataaaagtccggctcgcagttgagacggactttttacgtttataatgagtgaatgaatgcagtggcaatgccaaagtagattaataaagataaaatatcgtttaacgttgtaatcagcggtccagaagcaatcgccgggtctactttcagtttgtgcaaaataatagggataatcgttcctgacatcgtgccgatgattaaggttaagaacagtgaagaggcgacaacaaatcccaaaagcgcattcccctgccatatgatagaaacaatcgcaatcagcacagaacaaaccgctccgataaaaatgcttgttctgaactcccggaagatcaggcgcacaatcgtttttttgttcatttcttctttagacaaacctctgatgacaaccgcaagagattgtgttcccgtatttcctgtcatccctgacaccatcggcatgaaaaacgcaagcgcgacaacctgcttcagcgcgtcttcaaaatagctgataatgcttcctgaaatcagtccgataaataagagtaaaatcagccatggcagacgccggtatgccgccacgtaagcttttgtgtcaaaggtgatgtctttaccggaagcggcaaatttttcgtaatcctcatcagcttcccgaataacaacgtcgataatatcatcaaccgtcacaatgccgacaagcacgttgttttcttctacaaccggtattgccaaaaaatcgtaacgttctatcaggcgggcaacttcttcctggtcctgaagagcatctgctgatatgacgcgggtaaacattaaatcctgcaccttttcttcaggttcacccagaatcaaatcgcggtaggaaagaaccccaaccagctgtttgctttcattaataacatataagtagttgatcgattcagctatttcagcgaagcttttcagtttgacgaccgcgtcttttaccgtgtaatgctgagggatccacacataccggtttgtcatcatgcgtcccgctgaatcagccgggtaattcatcaagagctgtacagcttttgattctgacgcttccatgctggataaaagctgttccttcagttcttcgtccatttcttcaagcaattgagcgaggtcatcgttgtccattttgttcatcgccagtgttgcttttgtttttccgactttatttaagacgacaagctgaaattcgcgttccagctccccgatcatatcagtgatatcgtctacagttaaataagataaatagcgggcgcgatgtttttccggcatttctttaaaaataaatgccatgtcatagggctgaagctcatcaataacacttctaaaatccctgattttcccgtctcgcagtaaaataatgatgcgtaaaatgagttcgtcataggtcatgttttgaaccatcgggactcgtacctcctctacggagacgtgccggcctcgccagaaggtgcggcagttcgtctcctcatcgtgtaatcaattgtcttgctgtcatagtatatgggtacttcttcagattgactcgaatggggagaatccatactccgcacctcctttgattggtttcgttttaaaggcataaaaaaagccttcgggattgaaggtgaaagaagcacggcaaaaaaagcgtgcgggcgccttcaatcgtagagctttagcactgtatggcataggacaagcatccagctgcattaaaaatcaccttatgtcgatgatttctgttgacccattggcgtctttggacatttttgggcagcagcgtatctccatacaggagcctcacctaacgaagttcctaattgaattgacacactgagattacagaaaaaaacaagctatgtcaactcaaaaaagtaataaatgcgcttacatcacaattacggaacaaaacaagggcctaagcccttattctgttgtttgtgtctcgtcatcttcagaaagcaaatgatacgtttcatgaagaaataaggcatactctccttccttcgtcggatgagggacatattcagcctgattgatgtattgctcctctttcttttccatgcgtttcgcctccttttctacttagattgtccaaaagaaggtttcttatcatgaaaaacccccgctgcagcgggggttttgattagtcatctatctcctgtttgataatgcgtccatcttttgcggaaatttcaaattctgtctcagttccttgcttcgtttggatttccatttcatagatgtaagcaccgtcatcttcgtcaagcttactttctgttacggttccacctgtttgctttaaagcaatttcttcagcttcttctttggttatggcgacttgttctgctttctcctttaacgggtcattaagcgcttgttttgtatgaatatctacataaacgtcgtagtcttcaccttctttttcaatctccacttcatagacttctttgccgttgtaaaggtctctgtcaatgtcttctactgtgccgtcaacaactgttttagcaattgcttctgcttcttgttcagtgagtgcatccgtcttagaagaagcctgtctgttttcattgttttctgtggcaaacgcgttgtagctgaatcctccggccgctaggcaccctgctaaaagaccgaccatccattttttcttgagcatttgtgagccctcctttgttttgtatgagtacagtttacatactcaacatgaaaggaaaacgagagcaagatgagaatttgatgagaaaccgtcagtcttcatacacaatgttagctacctttcctgtgtaggcattgattttcactgtcgcttccttattatcaggaagatcaacgtctacttcaaagatgagagtgccctcactttcttcgagatctgcgtcatccgctgttccgcccgtttttcgctctgcaattgttttggcttcttttttcgtaatcggcgttttttgttgatctttgctgctgatttgatcggcagacaagactgtttttgcctgcatgtctaccttcacttcgtatgttttcccgtcttctttttgtatggtataagtggcaacttgactttgccgtgtttgttttttgaccgttcccggcacccgctcaagcgcgagatgctcggcttctttttctgtcatggcagatggattcactgcttttactctattcattgaaagaatgtcagccgatattgcgtctgcttttacaaagtaagttccctttggattttcaagggttatatcatatgtttttttatcctttgattgtgttgctttcgtgaccttgccttcataagaggcttcgactttttttacgacagtctcctttgacaatacgttctcatgggtttgccgaatgatgagaaacgtacagatgatgacaactaaaatggctgctgcagcaaaagatactgtttttattgttttagtcatcggcctcccccattctgttcgctgaattgcatggtgacagctgttccttgtcccggcttgcttttgacagacagctcaatgccatgctcatcagcgatttgcttggcaatggaaaggcctaaacctgttccgcctgtttttctgtttcgtgcctcatctgcccggtagaaccgttcgaacaaatgcgggatatgctcctcaggtattccgatgccttcatccctcactgatagaaatggccgtccattcctcgttccggctgacatctcaataggcttttcactatactttattgcattatcaagcaaaatggtcaacagctgcttgatgcgttcttcatctgcctttacaagcaggctctctttatctgtttcaagcaatatgtcacgctgataaacggactggagcgtttgcataaccgcgcgcgccgctttaatcagatcgattgttttcagatcaacctcgagtccttgatggcttttggccagcgccaaaagctgattggtcagttttttcatatgcaccgcttctgagtgaatggcttctatcgactcctcaagcacctccggcttttttgcaccccaccgcttcatcaggctgctgtagctttctataatagtgagcggggttttcaattcgtgtgaagcatcttgaacaaattgctgctgtttatcatagtgctccttcagcatcattgccatttcattaaatgtcagccccatttgatacaattcatcgttggactgtccttctaaagaaatcgttttaaattctttgtctcgctgtatgtctttcattgtgatcattaatcgtctgatcggattgatgattcggcgggctagcaagctgcctgcaaaaaaagaagcaatgcagacagcagcacttgcagcgattaagatgattttcagcagaaacagactctcttctgtgttctccagtctttcaaccagctgaagagacacgacttgtccatcggtccaaatcaccggaacagcagcctcggcaaacagcttgccgtcaggtttcctcacatctgccgtttcgccgctatgaaaagagagaggaaaatctttataggctttttcttttgtgatcgtcataacggctttttgatcaccattcactacacgcaccatgccatttgccggaagataggcctgcagcatatcctgcaaagccactccttctgtttcagcggcacgcagcgcttcggcaatgttatccgtctcatcagcaagccgggccgcatcctttgatgtcagcgcagacgaaaaaatgagatatactgcggtatgaaccaaaattaataaaatcaacagtgatatcgaagtgtatagatgaatcttggtcttcagcttcatcgtttaccccttaatggcatagccgaccccgcgaatcgtatggatcagctgtttttcgtaaggatagtccagtttttttctgatgtatcttatgtagacgtccacgacatttgtatcaccgatataatcaaatccccatactgagcttagaatttgctcccgtgtcagcacttgctgcggatgctttagcatatagacgagcagatcaaattcccgcggcgttaattccacctctttgtctccgcgtctcacttcacgggttttttcgttcacccgcaaatcgtcatatgtaagaaaggtgccgatatcttcagtttttgttccattttgccgcagcgccgccctgattctcgcaagcaattcctcgatttcaaacggcttggtgacatagtcatttgcaccgatgtccagacctgttaccttatcaggaatactgtctcgcgccgttaataatatgaccggtgtctgcgaatccgtttttctcaagcggcgcagcacttccagtccgctaagccccggaagcatgacatcaagaagcaccaaggaatacccgccttccgctgccgcatcaagaccttctgtgccattgtgtttgatcgtgacgctgtatccttcatattccaattcaagctgaagaaccctggcgattttttcttcatcttccacaattaatatgtgtcctttttccaaatttgaccatcctctcccgtccctatatgaaaaaaatgatttcgttgtttacaaaatgattcttatcatctattatgatgtcaaaataaaaaattgtatacggaaagcactaggggtgctgttttggctgagataaagcgcggaagaaacgcgctttgatcccttatgacccgatctggataataccagcgtggggaagtgcaggttgaccgaatggtgtatttttttgtgcgcttaatcgatctatgactgcatattcccttaggatatgcagttttttattttaccaaaaaaacaggaggtcggagaaatggagcatatttgcggtacaagcagaatcgccggttttcgcttctctttatatccgatgacggatgattttatcagtgtgatcaagtctgcgctgaaaaaaacagatacatccaaggtttggacgaaaaccgaccatatcagcacggtgttacgcggatcgattgatcatgtattcgatgctgcaaaagccatttaccttcatgcagcaaacagcgaacaacacatcgtcatgaacggcacgttttccattggatgcccgggtgacacacagggggatacatatctttccaaaggtgataagcgtgtcaatgaagatgctgtccgaggcttgaaggcggaagcgccgtgccaatttgccctttatccaatgaatgagccggattatatgggattgattatggaggctgtcgacattgcaaaagcccaaggcactttcgtacagggtgtccattacgcgagcgagcttgacggggatgcgcatgacgtattcagcacattggaggccgttttccgcatggctgagcagcaaacaaaccacatcaccatgactgtgaatctttcggctaacagtccatcaagaaaaaacagaaagcagggataacatgaaaagctggaaagtaaaagaaattgtcatcatgtccgttatcagtatcgtatttgccgttgtttatttattatttacacatttcggaaacgtacttgcaggtatgtttgggccaatcgcctatgaaccaatttacggcatttggtttatcgtttctgtgatcgccgcgtacatgattcgaaaaccgggtgcggcgctcgtttctgaaatcattgccgctctcgttgagtgcctgctgggaaatccgtctggcccgatggtcatcgtcattggcattgttcaagggctcggggctgaggctgtatttcttgcaacacgctggaaagcatactctctccctgtccttatgctggccggtatggggtcttcagtagccagctttatctatgatctctttgtttctggctatgcagcctattcaccaggttatctgctcattatgcttgtgatccgcctcatttccggcgcgcttttggcggggcttctcggaaaagctgtcagcgactctctcgcttatacaggtgtgttaaacggaatggcactcggaaaggaactgaaaaagaaacggaagcgggcgtcagaacatgcaagcctttgatgagcttctgacggttgagcagctcagcttctcttatgaagaagacgagaaaccggtttttcaagacatttcgtttgagcttcaaaaaggagaatgtgttttattattaggaccgagcggatgcggtaaaagctcgctcgccctttgtttaaacggtctatatccggaggcttgcgacggcattcagtccggacatgtatttctatttcaaaagccggtcacagatgctgaaacctccgaaacgattactcagcatgccggggtcgtttttcaggatcctgatcagcagttctgcatgctgacggtggaggacgaaatagcgttcgggctggaaaatctgcaaattccaaaagaagaaatgacagagaaaatcaacgccgtattagaaaaattacgcattacccatttaaaagaaaaaatgatctcaaccctttcaggaggacaaaagcagaaagtggctctcgcctgtattttggcgatggagcctgagcttattattttagatgagccgacctctcttttagaccctttctcagctcgggagttcgttcatctgatgaaggatcttcagcgggaaaaaggtttcagcctcctcgtcattgagcaccagcttgatgaatgggcgccttggattgagagaacgatcgtactcgacaaatcaggcaaaaaggcactggatggcctgacgaaaaatctatttcagcatgaagcggagacactaaagaaattgggcatcgccattccaaaggtctgtcatctgcaggaaaagctgagtatgccgtttactttatcaaaagagatgctgttcaaagagcctattcctgccgggcatgtcaaaaagaagaaagccccttctggggagagtgtgcttgaagtcagcagcctttcgttcgcgagaggacagcaggcgattttcaaagacatcagcttttcgttgcgcgaaggctctttaacggcgcttgtcggtccgaacggaactggaaaatcgacgctcctatcagttctggccagtctcatgaaaccgcaaagcggcaaaatccttctctatgatcagccgctgcagaaatataaagaaaaagaattgcgtaaacggatgggatttgtttttcaaaaccctgagcatcaattcgtcaccgatacggtgtatgacgagcttctgttcggccagaaagcaaatgctgaaactgagaaaaaagcgcaacacctgctgcagcgttttggtcttgcgcatttggctgatcatcatccgtttgcgatcagccaagggcaaaaacggcgactgagcgtagctactatgctcatgcatgacgtaaaggttttattattagacgaaccaacctttggccaggatgcccgcacggcggctgaatgcatggaaatgattcaacgtatcaaggcagagggaactgctgtccttatgattacacacgatatggagctagtctcttcgtatgctgacagcgtgcttgtgcttcacgatacaggcctggcctttgacggatctccagcgcagttgttttctcaagaaacagggcttgttcaaaaagcaaagctcacccttccccttctatatgaatggatggcatttcaagaggaggtgcgtgatgaagcaaccgttacatctcattaatccgactgtgaaagcggcggcggttttttgttgtgtcgtcatgctgtcgtttatttacaacccttacactccggcatgtttttatatcatcatcgttgcgggcgttttactggcggccggaatcccattgaaaaaatggttgttgtttacgattccgtttttgattttagcattcggatgcgtgtggacagccgcagtttttggaaaagtgccgacaacaccggataattttttgtttcaagcaggccctatctccattaacagcgataatgtgtctgtcggcatctctctcgggtttcgtattttatgcttttccgccttatcgatgatgtttgtttttacaaccgatccgattctatttatgctgagccttgtccagcagtgcaggctctcaccaaagctcgcgtacggtgtcattgcaggctttcgctttcttccgctgttaaaggatgaggtccagctgattcagcaggctcataaaatcagaggaggagcggcggagagcggcatcattaataaaatcagtgcgttaaaacgatataccataccgctattggcaagcgccatcagaaaagcggaacggacagcgcttgcgatggaatcgaaaggatttacaggaagcagaaaccggacatactacaggacattgagcgtgaaccggcgcgactgggtgttcttttgcctcgtcctcttattattcgcgggatcctttctcgtatctttatgtttcgcatcataaaaaatccgctatcacagatagcggatttttttattgatgatagtttaatgcttgggcaaggttggttttaatagtaatattcgaaaagtcaatccccagctgtacagcagtttgcgcaatttcaggcctgattcctgacagggttgaccggacaccgatcagattaagcgcctcaatcaatttaaagatctggtgcgccaccatcgtatccaccacaacaacacctgacagatcgattaacagatgctccacacgtcttttcgcacaagcttgaagcgtgttttccagaataaacttcgcccgttcggtatcaatgtcaccgacaagcggcagcagagctgttgatttgctcagggtaatgacaggtgagcttaattccaatatcatttctctttgggcgtttaattgctgcttggcattcatttcagcgtgatcaacgaatgtataaatggtgaaatcaaatacttttacaatcaaatctgcccatttttgcttctctcccggttcaaacgctgattcattttcttctgcgaacttctcaaaatacttcgtatataatctcctgtttctcataaactcccgaatgacatactgaaccggtgtgtcgagatgtttttgatcgttggtcagctcaatgacccactcttgaaactcttcgagaaattgtttttccggtaaaacatacatgtaattcagatgccggtaaaattctctgtcctgctctttcaattcttccgttactgttgcattatgtagggcgtaaagcgaattcggatcactttcctccatcgtttcaatccattcctcggccatttgttccacatgctctgaaaaaaatgcatataatttttcattcagtttcatgacactgctcctttccccaacactattataacttgacttacagttgaatcccagtcatacatgttgaagccatccaatattttgaagattactaattctttggtgtgtatcctattttttcaaaatgcttcaaatggctctgtccgagcgcttgcttttttcatataatatgaggcaacacccttgaatccacttgcaagcataaaaaaggagggcttttttatgaatggtgaaatccgcttgatcccgtatgtgacgaatgagcagatcatggatgtaaacgagcttcctgagggcattaaagtgattaaggcgccagaaatgtgggcaaaaggggtaaaaggcaaaaatattaaagttgctgtattagacacaggctgcgacacaagccaccctgatttaaaaaatcaaatcatcggcggaaagaacttcacggatgacgacggcggcaaggaagatgcgatttccgactacaacggacacggcacacacgtcgccggaacaattgcagctaatgattcaaacggaggcattgccggagtcgcgcctgaggcaagcctattgattgtgaaggttcttggcggcgagaacggcagcggacaatacgaatggataattaacggcatcaactacgcggtggaacagaaagtcgacatcatctcaatgtcccttggagggccaagcgatgtgccagagctaaaagaagcagtgaaaaacgcagtgaaaaacggagtgcttgtcgtttgtgcagcgggaaatgaaggtgacggcgacgaacgcacagaagagctttcctaccccgcagcttataatgaagtgattgcagttggatctgtttctgtagcgcgagaattatcagaattttctaacgcgaataaagagattgaccttgtggcaccaggagaaaacatcttatccacccttcccaacaagaagtacggtaagctgaccggcacttcaatggctgcccctcatgtcagcggtgcgcttgctttaatcaaaagctatgaagaagaatcatttcaaagaaagctttctgaatctgaggttttcgcacagctaatccgcaggacacttcctcttgatattgcaaaaacgctggcaggcaatggattcctgtatttaacagctcctgatgagctcgcagaaaaagcagagcaatcacatttgttgaccctataagattatttttcttatataatatacaccacatcatgtaaataaaaatttcaaattctatgttgacaatgaatttgaattactgttaagattaccaacaaatgattcaacttttcaaaaaattaataacattttctcttatcgagagttgggcgagggattggccttttgaccccaacagcaaccgaccgtaataccattgtgaaatggggcgcactgcttttcgcgccgagactgatgtctcataaggcacggtgctaattccatcagattgtgtctgagagatgagagaggcagtgttttacgtagaaaagcctctttctctcatgggaaagaggctttttgttgtgagaaaacctcttagcagcctgtatccgcgggtgaaagagagtgttttacatataaaggaggagaaacaatgacaaccatcaaaacatcgaatttaggatttccgagaatcggactgaaccgggaatggaaaaaagcacttgaagcgtattggaaaggcagtactgataaagatacgtttttgaagcaaatcgacgaactatttttatccgcagtaaaaacacaaattgaccagcagattgatgttgtgcctgtttctgatttcacacagtatgaccatgtactcgacacagcagtcagcttcaactggatcccgaaacggttcagacatttgactgacgctaccgatacatacttcgctatcgcccgcggaatcaaagacgctgtatctagtgaaatgacaaaatggtttaatacaaattaccattacatcgttccggaatatgacgagagcattgagttccgtctgacaagaaacaaacaactcgaagattatcgccggatcaaacaggaatacggtgtggaaacaaagcctgtgattgtcggcccttatacgttcgttacgcttgctaaaggctatgaaccgtctgaagcaaaagcgatccaaaaacgccttgtgccattatatgtacagcttttgaaagagcttgaagaagaaggcgtaaaatgggttcaaatcgatgagccggcgctcgttaccgcctctagtgaagatgtacgcggcgcaaaagaattatttgaaagcattacaagtgagctttcatccttgaatgtgcttttgcagacgtattttgattctgttgatgcttatgaagagctgatctcttacccggttcagggaattggccttgatttcgttcacgacaaaggcagaaacctggaacagcttaaaacacatggcttcccgacagataaagtgctggcagccggcgttatcgacggacgcaacatttggaaagcggaccttgaagagcgtctcgatgccgttcttgatattctcagcattgcaaaagttgatgaactgtggattcagccttccagcagcctgctgcatgttccagtagcgaaacaccctgatgagcatttggaaaaagacctattgaacggattatcctacgcaaaagaaaagctggccgagctgacagctttgaaagaaggcttagtatcaggaaaagcggcgatcagcgaagagattcagcaggctaaggctgatatccaggcgcttaaacagtttgcaacaggcgccaattctgaacaaaagaaagagcttgagcaattaactgataaagacttcaagcgcccgattccgtttgaagaacgtttagccctacaaaatgaatctctcggccttccgcttttgccgacgacaacgatcggcagcttcccgcagtctgctgaagtgcggagcgcacgccaaaaatggcggaaagctgagtggtccgatgaacagtatcaaaactttatcaatgcggaaacaaaaagatggattgatattcaggaagaattggagcttgatgtccttgttcacggcgaatttgaacggacagacatggtcgaatacttcggtgaaaagctggccggtttcgccttcactaaatatgcctgggttcaatcatacggctcacgctgtgtccgcccgccagtcatttacggagatgttgaatttattgaaccgatgacagtgaaagacacagtctacgcacagtcattgacttccaagcatgtgaaaggaatgctgacgggcccggttacaatcttaaactggtctttccctcgaaacgacatctcgaggaaagaaatcgccttccaaatcgggcttgcccttcgcaaagaagttaaagcgcttgaagacgcaggcattcaaatcattcaagtcgatgaaccagcgctgcgtgaaggccttccattgaaaacccgcgattgggatgagtatttgacttgggcggcagaagctttcagattaaccacttcttccgtgaaaaacgagacacaaattcatacacatatgtgctacagcaacttcgaagatatcgttgatacaatcaatgatcttgatgccgatgtgattacaatcgaacatagcagaagccacggaggatttttagattacttaaaaaaccacccgtatttgaaagggcttggccttggtgtatatgacattcacagccctcgtgtgccgtcaactgaagaaatgtacaatattatcgttgatgcgcttgccgtctgtccgactgaccgcttctgggtaaatccagactgcggattgaaaacaagacagcaggaagaaacggttgcagcattgaaaaatatggttgaagccgcaaaacaggcaagagcacagcagacacagctagtataatttgaaaaaaccatctgcatttggcagatggtttttttctataatacagccacaatcggtttcttatttagcaaatcccccaaatactttgtttattttgcacttttttaagaatgttctttgcattcttttcggctatactaataacactctattgacaggagggattgggatgaatcatgaaacgttcttaaaacgggctgtcactctcgcatgtgaaggagtgaatgcaggaatcggcgggccttttggagccgttatcgtgaaagacggagccattattgcagagggacagaacaacgtcacaacaagcaatgatccgactgcccacgcggaagtcacagctattcggaaagcctgtaaggtgctaggagcctaccagcttgatgactgcattttgtatacgagctgtgaaccatgcccaatgtgcttgggcgccatctactgggcccggcctaaagccgttttctatgcagctgagcacacagacgctgccgaagccgggtttgatgattcattcatttataaagaaattgataaacctgctgaagaaagaacgatccccttttatcaagtgacactaacagagcatttatccccgtttcaagcatggcggaacttcgccaataagaaagaatattaaaaggatcaggcatgcgcggcctggtccttgttatttctccaagtagccgctatgccctgtgcaaatacaaaacagcatatacgcgcaattcagcacggcagacaccgtgccagccacccgcttcatctgtaacttttggtttaaaggcatgcttcaaacgcttctctgaagttttatcataaatctgtgcccgccccgcatgtccgacaccaaaaaacatcctgagaatcctcaggatgccggtcattattttaattctagttttacatcaacatttcctctggttgcctttgagtaaggacagaattcatgagcggcgttgacaagctcttgtgccttttcccgatctaaatctttcgtgttcacaacaagtgtgacaccgattttaaacccgccgtcgctctcatccttcatgaggctgacctgcccttcaatctccgaatcaatttcgatattctgctctttggctacgtgttcgagcgcgccgccgaagcatgcagcataccctgccgcaaagagctgttccggatttgtgccggtttgtccttcttttttggcatttggcatgacaatatcaaaatcaagaacaccgtcatctgatgtaatatgtcctgctcgtccgcctcgcgcggttacttttgctgtaaatagtgccatatttcccaacctccttatttgtatctagttgttatatttccctttctgatctttttaaacatgctatgtttgccgagaataggaaaagtgaggtttttcagatacaatagaatcgaatgacaaaaaagagttggtgaacaaaatggaaaataaatttgatcatatgaaattggagaatcagctttgttttttgctatatgcgagttcgcgggagatgacaaagcaatacaagccgctgcttgataagctgaatataacataccctcaatatttggctttgcttttgttatgggaacatgaaacgcttactgtcaaaaaaatgggcgaacagctgtatttagattcaggaacgctcactccgatgcttaaacgaatggaacaacagggtttgattacgagaaaaagatctgaagaggatgagcggtccgtgttgatcagcctgacagaggacggagcgttattaaaagaaaaagcggttgacattccagggacaattctggggctctcaaagcagtctggggaggatctcaaacagttaaagtccgctctatatacattactggaaacacttcatcaaaaaaattgaggatgccttgtacaggcatcctctttttatttattcagcaacttcaagtgtcacatcaatatttccggaggttgcttttgagtacgggcagacgccgtgcgcttttttcacaagcgcctccaattctgatgcactgactccttctccttttacttgcagcgtcacacccagcttatagccctggtccgcttcatcctttaacaggctaacatttgctgtaacctctgtctctacttttacccgttctgttcttgcgacaagctgcagggcgctgtcaaagcaagctgcataacctgctgcaaacagctgctctggatttgtcgctttttctaatttcttggctctcggtgtccccggcattgcgacatcaagctcaagaacgcggtctgatgaaatgacctttccttctcttcctcctaccgctgaaacagttgcggtaaataatggctgactcatttttcattcccccaatatattttatacaattaaattgtacacaattaaatttgaaatgtcaatttttcgcgtataaaaaagcttatctcgtaatgagataagctttttcattgaacattaccccgctattcacggatttgcccagttcctttaatgatgtattttgtagaagtcagtgcaggaagccccatcggtcctcttgcatgaagcttttgcgtgctgatgccgatttcggctccgtagccgaattcaaagccgtcggtaaagcgggttgacgcgttatgatagacagcggcagcatcgacagccgtttgaaaatataccgcatttttgtcattttcagttaaaatcgcttcagaatgattggtgccgtattgttggatatgctttacagcttcttggacgttttcaaccgtctttacgctgaggacaggcgctaaaaattcggtttcccaatcttcttttgatgcttgtttgcttgaaggatgaagttcacataccaattcatcaccgcgaatttcaactcccgcgttttccagctggtccagcaattcttttccgtgctgtcttgcccaagccttgtgaatcagcaatgattcaatcgcgttgcatacagaagggcgctgcgttttggcatttacaacaaccttttctgccatttgcggtttggctgtttcgtcaatgaatatgtggcagtttcctgctcccgtttctaatacaggaactgttgattctctcacaacgagatcaatcagtttcttgcctccgcgcggaatcaatacgtctaagccatcatttaacgtaaagagctcttttgctgtctctctgctcgtatcctcaatcagctgcacagcgtgaatcggaagcgctgattgctcaagtgctctgtaaatgacactgacgagcgctttgttgctgtggatggctgaggagcttccccgcagcacaaccgcgttccctgtcttcaggcaaagggtagccgcatcaactgtgacgtttggcctcgcctcataaatcattcctacgacaccgagcggcacacggattttttcaataaacaggccgttttctttttcaatcgtttcaagagagtcgccgattgggtccgctaagtcgattaagagctccaccgcgtccgcgatatcgcgtatccgtttctcatccaatgagagacggtcaatgatgtccggtgttaaaccattctcttttccgttcacaatgtcttttgcattctccgccaagagaaaatccagttctttgcggagtccgtttgcaatgaggctgagcgcctcatccttctcggctgttgttttcatgatcatttcggctgctgcttctttcgccagcttcgcttttacagaaacttcactcatttttccgcctcctagtcttttacattgacccagtcattcctatgaataacctcaaacgttttctcaaaatcaagttcgtcactgcgtttgcctttagcctccataatctcctcggaggagtaatgagtttggcctttgccgatcacgccgcccggtcccctgacttccacaaccgcccctttcggaaagcttccgttcacgcccacaactccagcgggcaaaaggctgcttccattatggatcatcgcctcttcggcacccgcatcaatgataatttctcccgatatcggcgagtggaactgaatccactgccttgtgttgttaaccgaagatagttctttgtctccgatataagtgccgtctcccctgccgtccaaaatgtccgcaagtttttgctctccgctgccagttccaatgaatactttcactcccagagacagcgcggtttgtgtggctaacagctttgatttcattccgccggtgccgacctttgatccagctgaacctgcatatccaagcaattcaggcgtgatctctggcaaataatcaaatcgtttcgcctcaggattttcatttggattggcatcatacagtccgttaatgtcagtgagaatcatgagctggtccgcgtgaatcaatccgctgactaacgcagaaagcatatcattatctccgaatgtcaattcttcaacagatgtagaatcgttctcgttgataatcggaatgacgccccgctctaataattccattatcgtagcatacgcgtttcgataccgttctcttttcgaaaaatcatttctcgttaaaaggatttgtcccggagtcagtgagtattgtttaaattgattcatatattgctgcattaacagtgtttgtccgaccgcggccgccgcctgttttcctttgatggtaacgggacgggatggataaccgaggctggaaaaccccgccgctacggcacccgaggtaatcagaatcatttcatgccccgctttttttaacacggaaatcgcctgaacatgctctctgatttttgcctcatcaatgcttcctttgctattcgtgagcgaactgcttcctattttcactactattctttgttttttcatttattctcctccgcggctcttctacaataaaaaaacccatttcatcctgattcataaggacgaaatgggtttccgtggtaccaccttgattgaacgcgcttgtgcacgctccgctctcctgtaacgccaggttatgcgcctaggttttccccctaggactccaaggcaggttcggcaggtttcatgcggcaaaatgtttcagcgattcattttgctctctgtcacagaaaggtctgcttactaatcctcttcaacgctcaatgatttttttatattatgcaaagaaaaaagacacttgtcaaggttttttgtcatcaaaaatagcccgcattgcgcgggcctcttgcagtctagttaaagacgattgttttattttcatgaacgatgacacggtcttccaaatgccatttcacagcacgggcaagcacgctgcgctcaattgttcttccgatgtttttcagcgcttccgcattatcgcggtggtccacacgctcaatatcctgttcaatgatcggcccttcatcaagatcgtttgtcacataatgagatgtcgcaccgatcagtttcacgccgcgctcgtaggcccgtttgtacggattcgcaccgataaaagctggcaggaatgaatggtggatattgatgatgcgattcggatgagccgaaacaaaatcaggagttagaatctgcatatagcgtgcgagcacgatcacatcaacatcgtactgctccagcagttcaagctgcttcttttcgacttccgctctgatgtctttgttcgctttcatatagtggaatggaatgttcaggcgctcaaccagctctctcgcttcctcatggttactgatgacaacagcgatctccgccatcaggttgccggtttgccattcccaaatcagctcatgcaggcagtggagctcctttgaaacgaaaatggcgacacgcttcagttcgctcgccaaagttaagctccatgtcatgtcgaatttttccgcaacagaggcaaacgctgcctgaagtgatgattttttttcacgaatgcctgcgcagtcgaattcgattctcaggaagaaccggccgccttcagggtctgtcgtatattgatttgattctataatattggcaccgtgttcaaataaaaacgcggaaactgcagagacgatacccggctgatcggggcagctgaccaagagccgacctttatcctcatttccgtcacggtattcgtccaaccgctgagtcatatatgatttcatgaataatccctcttatctttgtaagtctaaactatttatccattatactgaagatttgataaaaatcaatttatgacagaatttttaaaccaactgctgagcataaaatcaacgcgataaagaagatccgtttggcgtctttctgctccttgtaaaagaggatgccgataagcgccccgccggcggtgccaattcctgtccagaccgcgtaagccgttcccatcggagtggtttccattgcgtacgacagcaaggaaaatgaagcggcaaaaccaacaatgatcaacagcacccatttcacgcttttttctttcgcatattgattcataagggccacgccggccatttctaaacagcccgcgcacaataaactgatccagtgcagcattatgcctcgcctcctttttcctctgtctcatcctgtgtcacaagcttcaacccgattacaccgattaagagcacgccaattaacaatagcttcggccatccaaccggttcatgaaaaagaacgatttcactaagtactgttcccgctgtgccgagcccggtaaagacggcatacacggtaccaacaggcagactgtgagtcgccttcattagaaggtaaaagctgaatatgatgccgatggcagtgccgctccatgttaaggctgagtcagcgtgctttaagcctatcacccaaacaacctcgaaaacagcggcaagcacgaccaatccccatttcattttgagtcattcctttctatctattaagattctccgaaaacaaaaaaaccccggacagtcgtctcacatgagattgactctcccgggcttttttccctccgtgtgcatacgcgcttctatttacgcgtatgtgttttctctcggaccagtccatgtcaattgacatgcggaaccctagaaaactttacatgatatcatgatactaaactcagctctatctttcaattgtaagattttctttcatataccgcgatcggtttattccattttctgatcgttttgctgtaatgcatgccgattttctccgctacccgtatggacgctttgttacccggatcaatcaaagccgccattttgccgaactgccgctcgttaaagccatagtccagacaggcccgagccgcttcttgcgcatagccgttcccccagtggcggcgggcaaacatatagccaatttccattacggtttgattttcgatctgctggggaacgatgccgcattgccccaaaaactcccctgtccgcttatcttcggcgatccacagactaacgccgtaccctttttcatttcgttggttccaattgacccactcgcgggtttgcctcttatcttttaaaccggaataatatgtcatgacgtcaggatcattaaaaagcagcccaaacaaagtggcttgatcccgatcttccatacagcgcaaacgaattcgatcagtcacaagcttcgttttagcgttcatacttcgccacatcctgcttccattcttttttgagagcttcaatatgtgcctgatgatagcggttatgatctgccatatgccaaattccccatcgtatcgtcgcggtgtcaccttcgaaggaaagcggctggttcaaagcattttcagttaaagtgaagcataccgatttcagcttctctactacatgctgatgtcttttcaggagttcatctaagtctggctgattcaccggttcaggcagccgtccgctttcatctgtcatcgggccgtatgcctgttcaatatggtccgggatccgattttccttgatacgccagacccatctgatatcaacatttgtgatatggtgcaaaagctgagccgtgctgttttttgtttggcagcgccccttatagtaaagttcactgtgtgtcatatggcttacgatggaagccagacggagactgttttcttccactgcggaatacagcaaactgaccgttggcgccatgtcgtttcttatggataagtccttcatgttcagttcccctcctaactaggtacatttgacaccaaacaaaaattccctttaaaaaagaaaaaagctctcattacaagagagagccatcttaattgttatttcccggtttatataagtaaggatcatgctgcggttcattagcggtatttaaatcaagggatatatcaccgcgtgcattcatcgtgccaaggataatcgaagacagcagtttggggctgtaccctttttcctcaagcttctcaaacagccaggatcggtttttttggagatatttcaaattatgatcaaggatttcgccatccagtatgagcggaatcgggataaaattccgttcagcttccatattcaaatcccgcacctgcaccgctctcgcttcctctttcgggatgacgcttacttctcccgtttcttcaatgatagcaagatcaatgtcagccgggtcggcatagcccttttccctcagctttccgagcagctcattaacagtcagcctttctttacgaaggccgcgttcatcaatatccccgtttcggattaggacagtcgggctcacgactaggagccatcgccatttattagataaagagagcttgctcatgataagataaagcaccaaaaaagcacccgcataataaattgacatcggcagcttggatgtaaggatcggctcactgataatggttccgattgcgaaggtcaaaagcaggtcaaaattgttcatttgtgacacagcttttttaccggcaagccgaaacaaaatatatgcaatcgaaaatacgataactggcttcagtaaaaatacccataccatccataacaccgatctttacctccatccgctggtcatattgagcctattgtgccccgtggcaggccctctatgcatcagtgtctaggcgaacgtgcatatcgcctgaacataacataatagaaagtgacaccgattggaggcgcaatacgcaatatgaaaaatcagaagtcgaataccctttggccctttgatctgccattggctccccaacccgagggctaccagcagcaaacaatcgacaggctggccggtttggagctaagaatgaagcaactaattagagcgattgaggtaaacaatgaattgctgagaacaatgcaagaacagcaaaaccgtgtatgcacaaatggcagcgggtctgtgattgtccggatgtagaaaccggcgcttgtctgccttcttatatctcaataaaaaactcttctctgaaaggagaagagtttcatgtatgtgttcaaacggactgcgccaaacttaattgcgggccgaatagctcgtaatggatagactccggcgctgatccgagctctgatacaagcttatgcattgccgtaataaacgacggtgaaccgcaaatatagtaatccgcatctgtgttggcaatcagttctttgaggaattgctgatcaatctgtccttcatgaaaatgcagatcacctgcacggtcttcctctgtcggctcgcgatacacaaatgctgttttaacagcagaatgttttgctgcttcttctacttcatggcgcaatgcatgatattcactgtttttcgccgcatgaatgaacagaatttgccgttcaggctgtttggaaacagatgttttcagcatgctgatcattggtgtaatgccaactccggcactgatcaaaacgagatctttttgtgatgcatgatctaaaacaaagtcccctgccggtgcgctgatctctattgaatctccctcctgcagcccatcgtgtaagtaggaagacacgacaccatctttcttcactgaaattcgataatagtcttttcccggcatatcagacaggctgtactggcggatatgcgtatattcagaatcaggaatccgcactttgatgctgatatattgccctgcttggaattcaggtaacggcttgctgtcttccggtttcaaatagaaggatgtaatttctttgctttcccgctctttttttgcgataacgaatggcttatactccttccagccgccggcttgctcttcagcctgttcatacatgtctttttcaattccgatgaacgcgtcagcaatgactccgtacgctttttcccatgcctgcataatgtcaggagttgcagcgtctcccaatacatctttaatcgcaatcagcaaatatttaccgacgattgggtagtgctcaggcttaattccgatactgcggtgcttgtggccgatttgtttgacaaccggaatgatgtttcctaattggtcaatgtttgccgcagctgcaataacggcatttgccagtgcagttcgctgtgtttttttcttttggtttgtttgattaaaaatgttcaaaagctctggatggtcttgaaacatccgatcgtaaaaacggccagtgattgtttctccatgctgttgcaatacgggtacagtgcttttaataatttcgattgttttgttatctaacattttataaacaatcctttcgaaaagatgtatttaaaatatatctttaaaatacatgatcttacgaataaaagatatatctaaaatgaatctttaataaagttgtcacaaaattatcaatttaacatgacatttgttgcttttttatagaatcccctagcaaaaacggactaaccattgtaataatcaccattgaaaagtacaaaaaaacccaaaacaacttatgttttgggtttaacgttcaccaaggcttatcagttccgagcgcatttgcaagcgcctggctgtgtctcttgcggttcttacgttcattagcacgctgtacagctgtattatgcagcatgatttcttcttctgtttccggtacaaccctcggtacaggcaccggcttgccatttgaatctaatgcgacaaatgtcaaaaaggatgtggcagcgagttcccgttcgccagtcatcaaatgctccttaataactttcacaaatacttccatggaagatgtgccgacccatgtcacatatgactctaggcagacagaatccttttgcccgatcggctttaaaaaatctacagaatccattgaagctgttaccgtttcacgtctgcaatggcgcgccgctgaaatagaggcaatgtcgtctatgtagctcattaattttccgccaaacagcgtattatggttgttcgtgtcaagcgggaacaccctgctggttttcacaacctttgactctttacaaaatcttgtttccggtgtttccatacctttctcccctttgatgtctgatcttttagctaaatgcacttatattctcctattaaacaatattctcttccatttgtctaaaatttaaaatggtttaatgattttcatgatgagggaataataaatgtattcttcacactttaggaggaaaaacaaatggacgtatccatcccgaaatctcagcacaaaacggtatgccgaacggaatacggcacacttcaaaaagtgatcttatgcaaacctgagcacatgaccataaaagatgttataaacgaaacacaaaaacattttgaagatgacaatattcatgtaaaaaccgctaacgaccagcacagccgcttagtggaggcacttaggtcacacaacgttgaggtcgtccttttgcccgttcgcgacggactcccagaacaggtttttactagggacataggatttgtcatcggagaaaaagcctttctgtcaagcatgactgaaccgattcgccaaggagaagaagccgttataaaagatttttttcacagccaaggtatctcttacacccgcatgcttgatacgagtattgaaggcggagacgtcattatcgatgatgacattgtctatgtcggaatcagccagcgcaccgacatttcagctatcggccagctagaagaggcacttcctgaatatacgatcgttccagtgaagcttcatgaaaaatttttgcatttggactgcgtatttaacattatatctgaaagcgaagcgttaatttattcacaggccattgagccagatgcagccgatatgctggcaaaacgttatgatcttattgaggtgcccgaggacgaacaatttacgcttggcaccaacgtcctttcaatcggaaaaaaaacgatcatcagtctccctggcaaccgccatgtcaatcaacagctatcgaaaagaggctatcacattatcgaaattgacctgtcagaaattattaaatcaggcggctccttcaggtgctgcacaatgccgctgattcgaggcgaatgaagaatcttcccctttttcatgttttgaacagcttattttatcaagatacgttaatatagaggtgacatcatttttaagggggaaatcgcatgacaaaatacataggatatgtgggaacatatacaaaaggcggaagcgaaggaatttattcatttgagcttgatactgagaaaaaagcactcagcgagccaaagctggccgctaagctgggcaacccgacatatgtggcgacgaataaaaacaacaccatcctttattccatcgaaaaagcagacggccaaggcggagttgctgcctatcaaatcgataaaaacagcggcgaattgacatttctgaatcatcagttaattgatggcccttcgccatgccacgtaagcgttgatgatcaaaatcaattcgtactgactgccaattatcacagcgggaaggtacacgtttttccggttcaggaagacggcagcttgcaatcacctgtttcagaggccgctcacacaggaaaagggccgcacgaaagacaagaaaaaccgcatacacactacgcggggttcacacctgaacacaattatgtggtagcggttgatttaggtatagataagctctacacctataagcttaaagacggtgtgttgactgaatccggaagccattccttcgctcccggtgcaggacctcgccatatcgcttttcatccgaaagaaaaatacgcttatgtcatgacagaattaagcaatgaagtgattgcgcttgaatacaacccgacagccggcgaatttagagaaatccaagtcgtttctgccatccctgatgattttacagataacagccagggaagcgcaatacatgtcacgcaggacggacgttttgtttatgtcgcaaaccgcggccatgacagtatcgccgtatttgaagtgaatcaatattcaggagagctggctttcgtagaaagagtgtcgacagaaggaaactggcctcgtgactttgtatttgacccaacggaagggttcctcgttgcttcaaatgaagaaacaggcaaccttgtcttgtttgaaagagacaaagaaaccggccgattgacactcctcccatcaacggtttctgtcccttacccggtttgtgtaaagtttttacatcaagtataaacaaatggagtggctctagtaaaaaggagccactctttttatttatcttactttttccttcgtttcagcatttcgatacaaatggcaagcgacaaaacggccgggttcgatttcttgaagctggggacgagattctccacattcaggcatcgcctccggacagcgggtacgaaacacgcagccgcttggcggattgaccgggctcggcagctcccctttcaagagaatacgctcacgcttgtcctccaattcaggatctggaatcggaatcgaggacaaaagcgcctttgtatagggatggagcggttcacgatacaaggtgccgctctctgtaatttccatcatgtgtcctaagtacataacaccgatcctgtcactgatatgcttcaccatcgaaagatcatgggcaatgaataaaaacgtaagccctttctctttttgaagccgcttcagcaggttgaccacctgcgcttgaacagagacatcaagtgcagaaatcggttcgtccgccacgataaattcaggattcagcgacagtgctctcgcaatcccgattctctgcctttgcccgccgctgaattcatgcggataacggctgccaaaatcggggtgaagcccaactgcctcaagcagctcgtccacgacgagaagccgtgctttatgggtattgtagagattatgaatctccatcggctccaaaataatttctcgaacggtcatgcgcgggttaagtgaagcataagggtcctgaaaaatcatctgcagtttgcggttgaaggcaaactgctctttttcacttagtgcatgaagatttgtgccgcggtatgtcacgcttccttctgtcggctgataaaggcgcatcagcactctccccaaggttgatttcccgcaccctgattccccgactagcccgaacgtttctccttcacgaatctgaaaggtgaccccgtcgacagctttgactgtccgctttttccctgcgtcaaaatgcattttcagctggctgacctctaacaaaggcagtcgcctcatttgtctccctccttattctgaaaaacagcggcgcaccgcacataattctttttcatagattgtctctgttaatgtgaggatttcgattgacttccctgtctttggagaatgaagcattttcccgccgcctacatacagaccgacgtgatgaatcgctccttttccttcctcataagcaaaaaacagcagatcaccggctttcatatcatcaagcgggacacccttccctgccttagcctgatctcccgcatcacgggggatgctgtatccattcgccttaaatatactgtacataaatccggagcaatcaaacccaaacccgctgatccctccccacaggtagggaaggccaagaaaaaacgcacccgtttgaatgatgtcttcagcagtccctttctgttggctgacaggcactgcatcactttgcctcacaaacctttccccaaaaacggtcgaaaccttaaaatatccgttttcttttgcaataaggggcagaactgtcaaaaagcttaattcgatctccttttccccattgcttctgtacaaaaaggcagcaggtttgctgatcatcacatcgtgttgtgtatggatgggctttgttttttccagctggtactttttcatccagcccgggtatccgcgcggatcctttcgggatggctggctaggcacgatcacagaaacccattccccctgttccgccgtcacaagtaccttttcgccaaagagaacctgagtttggattacattgtctgtacataatccaagccgttcatcatacgtcatgcgctccagccagtctctgatcattacagtcggttgaagcatgaattgatcagacggacgaggtgaatcaggcgctgtccagatgttggccactgctgatatgacagtgtgcatcattgctctttttcccctttcaaaagcgcagccccgatgattccgaggcccggtttgccaggcatcgaaatcgtgctgccgctatatgttatgccgccattgaatacatctgttttcagcatcagcggcgcgtcaaaatcaaagcgtgtgatgtttctcttgcttgccgcaaaatgcgccgcggccgtaatgcccagcttcgtttcgatcatgctgccgaccatacactccaccccgcaggcctccgccatggcattaattttctctgctccgctgatgccgcccgctttcatcaatttaatattgatcaagtctgcgctccgggtttgcagaacttcgaacgcctggcgcggtgtaaaaacactttcatcagccataatcggcgtatctgttgcatctgtcacctttttaagcccagcgagatcatctttatggacaggctgctcgacaagctcaatgcctaggcccgcatcctccattttccgaatggcagttaccgcttccttcggcctccacccctgattagcgtctaaacgcagtttcacagctgatccgacacgttttctgatttcctggatacgggcgatatctgttgcaatatcatcttttccgacctttattttcagcgtttgaaagccttgtttgagataattctcggcatcagctgccatctcttcaggtgagttgacactgacagtataatctgtttccagcgtatctcgatatccgccaagcatttgataaagcggcagcccgcacatctgcgcccagccgtcgtatagagccatttctacagcagccttcgcgctcatatttcctgtaagaagatgctggatgtcgtgcagaatggcctcatagcccgccaggctttttccaagcaatgccggcttcaacacatggtggatggcactttcaatgctatccatgctgtctcctgtaatcactaacgtcgggggtgcttctccccatccgactgcaccgctgtcataagtaatccttactatgactgattcagccgtatacacagtgcgaagtgcggttttaaacggctttgtcagcgggacagcgattcggcttgtttcgattcgaatgattttcatgtcttcagcgccccttctgaaacgcccgcctctattacggctgttttttctgctgtattcatagcagctttcgcaccgatcggaacggcaatacttggcgagcagtggccgattttaaatcctctcagagcaggcctgcccgcagaaataatatagtcttccagcacctgctcaagcgagagagacttctctcgcttcaccgggacacaattgtgaaaatcacaaactagaattcccgccgcgtccgtcagcttcccccccattttcagctgattcagcatccggtcgatttgataaggctcctcgtcaatatcttcaataaacagaagctttcctctcgtatcaatttcaaatggcgtgcccagtgtagacgtcagcaaagacagatttcccccgacaagctcgccttccgcttttccaggaacaagctcggtcagcggagaaagctcttctgtataggtgaattccgtctcctggaagagctgcttatatgacgcttttgtcagcgggtgaacgtcgtcaaggccaatatccgtgctgagcatcgggccatggaaagtgacaagacctgtgttttgatgaatggcagtatgtaaaaacgtaatatcgctgtatccccaaaagattttagggtgtttgcggatcaagctgaaatcaatgcccgcggcgatacgtcctgtcccaaaacccccgcatgcgcacaacactgcttttacctcatcgtctctgaacatctcatggagatccgccagccgctcatcatcctgtcccgctaaatagccgtgctggtttttcagcgccttgcccaacttcacctgaagaccgagctcttctaaaaataaaagcgcggtgtcaagcttttttggatccggcggacttgcgggcgcgatcactccgactgtatcacccttgttcaacgctttcggcttgtaattcaacgaaaacactcctttcatttgctctgcaccctacgtatacgtgcaagaaagagaaaaaataccgctccttcgcataaagaagcagtatttcctcaatcgcctccatcagtttttatctgcccattttaaatcgatatagccgacagggtgacggacaattccttttacttgttcattttgcaggtgaacctgattataaaaataaaccggaatgatcggcgcttcattgatgagcagctcttcagcttgatgcataagagagaaccgtgttttttcatcggcttcgtttttcgcctgtttgatcagctgatcgtattctttattggcccagcctgtgcggttcatcgaatttcccgtttgaaaggcttccagaaaactgatagggtctgcataatcaggcaaaaatgagctttgagagaattggaatttcagcgctttttgatcctctaaaaatacgttccattccatattggccagcttcacatcgactccaaggctatttttcaatttttgctgaatagcttcggcaatctttttatgctccggctttgtgctgtaagtaagcgtgatcgcaggaagcttattatagttttcttccttcatgcccttttcgagcagctgcttcgctttgctttcgttaggcttgatcaggtctccgcctgcttcacggaaatctttgccgtcaggctgcgtaaacccaggcgatacaaaggcgtgcgccggtttttcattatttttcgtgacgtactttacaatttcctcttgatccacagccatcgcaaaggcttttctgatgttttcattttggaacggctccatgttgacattaaatcgatagaaatagagacccgcctggtcaacaatattgacgttatcctgatcaagcagctgatcactcagctcagcagggacataagcggtatcaagttcccctgattgaaacatctggtaatctgtatttctgtcactgaccatcgcccatttcaccttatcaagcttcactgtatccttatcccaatacgtgtcgcttttctccattgtgatgctgtcatcatgcttccattccgtcagcttaaacgggccgtttccgacaaatgtatccgactcagcaaaccactttggattgtctttatcgaccttttcatttaccgggaaatacgcgggattggacacaacgctcaggaaatatttttgcggtgcttccagtgtaacttcaagggttcgatcatcctttgccgtcaccttcacatcgtcttttttccctttcccgctgttatatgcttcgccgccttcaataaaataacctaggaatgccgatgaagcgccttttttcggatcaagcatccgcttccacgcgtattcgaagtctccggctgttacaggatctccgtttgtccatttcgcattttcccgaatcgtaaatgtgtaagttttattatctttcgaaacagaccatttctccgccattgccggctcgggctcatgatctttgccaagacgcgtcagcccctccatgatgttatttaacggctgccatgacacattattaaagccgatcggcggatcgaatgaagtcggttcattttcattatttacatacagcaccttttctccgctggtttttgccttatcatgactgccttcttttccggcctgttcatttgctgtgcaccccatcagcgcaaacgaaagtcctaatgcaagacccatgccccatagctttttcactcgtttcatcctcttcccccttttcatgttcaatccttcgcatctcctgacagcaccgcatgctctgctcgttgatcctgcagccagcagttgacggtgtgcgagtcagatctgatcgtctggcccgggtacaccctgtcacacacaaccatcctgttcggacagcgggcggcaaacgggcagcccggcggaggcgaaaataaatccggcggcgttccgtcaatcggggtcagctcagcgccatttaaatccagccgcgggacagagcccagcaggccttttgtatatgggtgctgcggctgataaaaaatatcttttcttgtgccgatttccgccattttcccggcatacatgactgcgactctgtcagctacctgggcaacaacccctaaatcgtgcgtaatcagaatgacagacacatccgtttttctctgaatctctttaaacagctctaaaatctgtgcctgaatggttacatccagggcggtggtcggttcatccgcaattaagatatcaggctcgcaaatcagcgccatcgcaatgacaatccgctgtctcataccgccgctgaattggtggggatattgctttaggcgctctccgggatctggaataccaaccaatgacagcatggaaagcacctctttccgtgccgcttttttgctcatttttttgtggcgcaatagcgcttcccccagctggtcgccgacagtcagcgtagggtttaacgccgtcatcgggtcttgaaaaatcatagaaatgtcggctccccttatacctctcatttctttgtcagagagacggcaaaggtctttgtttttaaatagaatcctgccgtctgtcaccttcgccgaataaggcggaagcaggcccatgatgctttgggaggtaacgcttttgccgcagccggattcgccgacgatcgcaaaggtttctcctttatacaaatcaaagctcacccctctgaccgcctgaaccgtcccgccgtaagtcgtaaaagacacgtgcagattttggactgacagaactttttccatacagctacctcctcagcttagggtcaagcgcatcctgcaatccgtcccccagcacattaaacgcgtacatcgtcagagatatgaaaaaggccggaaaaaacaggcgccaccaatgcccagataaaatcgtaggcaggccgtcattcgccatcacgccccaacttgcaaacggagcctgtatgcccaggccgagaaagcttaaaaatgattctgcgaatatggcggcaggtacggttaatgtcatttgtacgatgatcgctcccatagtattcggcagcaaattcttccggatgatgcgaaaggttttcgcgccaaaggttttcgaggcgagtacatattcataatttttaatctgaagcacctggcctcttacaattctcgccatgccgacccacccggtcacagtcagcgccacaataatcgtgcccagtcccggtcccatgagcaccatcagcaaaatgacaacaagcagatacggcagtccgtacagcacttcgataatccgcatcataatgctgtcaatcctgccgcctttatagccggcaacgcctccgtaaatgacaccgatcaaaaaatcaatcagtgctgccatcacgccgacaaacaacgagattctcgcgccataccatgttcgggtaaacacatcccggccgagttcatcggtgccgaaccaatgatcggctgagggcggaagattttgttctgtcagcgattggcgtacgacactatggggcgataaaaagggcccgataactgccatgacaaaaagaaataaaagaataaagagtccggccatcgctaatttattttttttcagcctcctccaggcatcctgcgtgtatgacaaactcggccgcttgaccgaatcggcttcccgatttttttcctgattcaagacaaaccactcatcaggcacctgattgtgctgttctggctggcgttcatccgtttgtacagggagattcacacgcttcaccctttcttatgcagtttaatgcgcgggtctaagagaccgtaggccaaatcgaccaaaaacagcatgataatcagaatgacgctgtaaaaaacggtcgttcccataatcacggggtagtcccgctgattaatgctttcaacaaaatattttcccattcccggaatggcaaagattttttcaatgacaaagcttcctgttaagatgctggcgacgagtgtgcccaggacggtaatgacgggcatgagtgcatttctgagtgcgtgttttacgataattttgaacggagaaagcccttttgcttttgctgtgcggatataatcctgtgtcagaacttcgaccatgctcgaccgtgtcagcctggcaatgatcgccattggccctacagcaagcgctgcggtcggaagcaccatatgaatcgggctcgtccatgtcgcagcgggaaatagtttgagattgacagcaaattgctgaatgagcaatgttgccagaataaaattcgggatggagatgccgagtactgcaagactcatcgcggcgtagtccaaaaagccattgcggcggagtgcagcgattacgcccagcaccagcccagaaatcacagcaatgacaatcgctgtcatcccaagctcaaaggaaacgggaaatccgcgttccagcatatcatttacgctgtccgacggttttttaattgaaggtccgaaatcgaatgtaatgatggattttaagtagaaaatgtattggaaaatgagaggatcgtctaagtgatagtaggcttcgagatttttttgaacggcttcatttgtgcctctctcctcgttaaaaggagatccgggaatgaccttcatgagaacaaaagtcagggtggtaatcaccaaaatcgtagctgccattgcccaaaaacgctttatcatgtatcgcgccaaagcctaaaacacccctttagcagaatgatgtccgcatcgcaagctcagtcatgacaagcatcgcctgataggcttcaagcatgtccttcgcctgaaattgaacggttgtagttcccgtcttgatttccgttcccggcatcagattcgcccattctgcttggccataattggcgaattcaatgctcagaactggcctgtcaggcggtgtgagcggcttgactttgtccttgttttgcagggcaaatgcggttttttctgtcaacagccgtccggctttcgcaggcgacaagcacttcactgcggatcttgaaatggtttgtttgactgcggctgtcgtcacgttcgggataagctcttctgcttccttcgccgcccggtcatccccggctaccattaataccgggacatcataataaccggcaacgtatgcatttaatccaagctcaccgacaggccgatcgtttatgtaaaaatgacggacgccgaaaatcatgctgtgtgacatgacaccaggagtcgaggctctcgcatgataaccgagaaacaaagcgcctctaaacgtatcatccagtccctccaccattgaaaatggtttgacgtcaccagaaatcaagtctgcttcagggtgaagcttttcaaccatcagattattcatcttcgaatgactgtcattgaccagcacctcggtacacccgctgttaaacgcttcagcaatacagtagtttgcttcttcagtcatgataagccgtccgcgttcataattccgcttgccggaatccacaaaggtatcgtccggaagacccgaaataccttccatatctactgacatgtacaatttcataacgctcctccttttttactaaattatgaatattctaacaaattatattaaaaaaagaggaaaaatgcaatataactgggaaaaatctcaatcattcagtgataaaaaaagaatcctctttcaaggattcatgtttgtttaccaacctgttctgtaagcagttcatattttctcagggttctttcaaatacctcatcaaaaacgtccggcacagaggcgtgtatcacctcagctccctctcccgttattccgcctttggttgcaacacgttccagcgtctcctcgaaagacatatttttttcgatcagcatcttgccagttccgtatagcgaatgaatcagaaaatcaaaggcttcttctttggacaggctgctgtttctgacggcagacagtgccagttcttcaaagattgcagctatgaatcccggtgccgagctcgttaaattgctggccacatctaaattcgattctttgatttcccgtacacggctgaaaaccgataacaattcattcagacgttcttttttctctgcagccagtgcttcactgtgaacgacaagtgagatgccggcttctgcttcggacgtaatggcaggaataacacgtgagataccggcttctgtttctgcctccaaaagacgcagcggcacaccggcagctatggatacgatgtgagtatttctgttcacatacgggtacagacggcgcattgtttcgatgacatggagtggcgggacgcatatcaaaatcaattggcacgtatttgcccaattctccaacggatcagccgatacgtttggataatctgacatgagtgcccgcagccgctcccccttcgttctcgtctcaataaatagctcattctcttttatttgttcatgtttcaacagctgtctagcgatcatatccgccatgctgccatatccaatcaatccaatctgttccatcgactcagtcctttcatatacaatatgaagtgtaccgttttccgcactttttcacaatttcccataatcttttcatttttatcccacagtttttgtttatgataaactcaagtcataaacctatcaatataaatagacatgtgaaaatagagaaacggagtgaacatgatggataactatcgtgatgaaaacagaacgaaaggtaatgagaatgaggtctttttaacgaaagagaacgatcagagcgcctcctactcggcccgcaatgtcattcatgatcaggagaagaaaaaacgaggattcggatggttcagaccgttgcttggcggagtgatcggcggcagtcttgctcttggcatttacacgtttacaccgcttggtgaccatgattctcaggacactgcaaaacaatcatccagccagcagcaaacgcaatctgttacagcaacaagcacctcctctgaatctaaaaaaagctcaagcagctcatctgcattcaagagcgaggactcttctaaaatctcagatatggtagaagacctttcaccagcgattgtcggtattacaaatcttcaggcacaatcaaacagctctttgttcggctctagttcttctgattccagcgaagatacagaaagcggttcagggtcaggtgtcattttcaaaaaagagaatggcaaggcttatatcattacaaataaccacgtcgtagaaggggcatcatcactgaaggtatctttatatgacggcactgaggttactgcaaagctggtaggcagtgactcgttaactgatttagccgtcctccaaatcagtgatgaccacgtcacaaaagtggcaaacttcggtgattcatctgatcttagaacaggcgagaccgttattgcgattggggatccgcttggaaaagacctgtcccgcacagtaacacaaggaattgtaagcggcgtggacagaacggtttcaatgtctacatcagccggcgaaacgagcattaacgtcattcagacagacgcagcaattaatccaggtaacagcggcggtcctttgttaaatacagacggcaaaattgtcggcattaacagtatgaaaatcagtgaggatgatgttgagggtatcggattcgccattccaagcaatgacgtaaaaccgattgctgaagaattgctgtctaaaggacaaattgaacgtccatatatcggtgtcagcatgcttgatctagagcaagtgccgcaaaattaccaagaaggcacactcggcctgttcggcagccagctgaataaaggcgtttacatccgtgaggtcgcttcaggctctcctgctgaaaaggccggattaaaagcggaggatattatcatcggcctaaaaggtaaagaaattgatacaggcagtgaattgcgcaatatcttatataaagacgcaaagatcggtgataccgttgaagtgaaaattctccgaaacggcaaagaaatgacgaaaaaaattaaactggatcaaaaagaagagaaaacttcgtaagacataatgcctcaggccgtaaaagcggtctgaggctttttattagataaaagacctaattgttctatgaaactttctgacgagatatccgtatatcatacagattgacatcattcacatcagatgctagaaacatcgtttgctaggaggcatgaacatgaaaaccgtgggactgggtatgatctgcgcaggattggcttttcttttgctgagctttcttctctctgaatcgacgttgacgtggggaattgtattgggtacgagtattctattaaacataactggtacggctctaatcatgcgtttcttaaaagccccccaatataacagctgacatgcagcaaagccgaggacgaaatctttaagttttgctgtttttatttcagcatgactgaaccgcagtacaagctcacaatctcttctttacccaatttccatatatctatcagcatcttttgctttagatcgtgctcagagcataaaaaccccctgtccattacggacagggggtttgaggttatgacatatgctggtctctatagagtcttttattttcaattccatacgatttttggacgatgtaaagcggcctgtctttggcttcatcgtagattctgccgatatattcgccaatcacgcccaaaatcagaaggacaatgccgctgaacaggagctggatcacaataagtgatgaccagccggtaatcgtgctgtctgtgaatagcttcagatacagcacgataaacatatacagaaatccagtacctgacattaaaatccccgcatagcttgccagcttcagcggtttatgtgaaaatgtcgtgatgccgtccattgacagcttcagcattttcttgagcgggtactttgtttctccggcgagcctttcatcacgtacatactcgaccgctgtctgtttgaaacccacccagctgactagccctcttacaaatggatttttttcttttaatctcttcatttcatcacagacttttctgtccatgaggcgaaaatcccccgtatcaatcgggatatcaatatctgtcataccgctgagaagccggtaaaacatagccgcggtttgttttttgaaaaaggtttccccttttcgtttagtccgtacggcgtacacgacttcatagccttccttccacttttcaatcatttctaaaatcagttcaggagggtcctgcaaatcggcgtcaatgacgacgattgcattcccctgtgcataatccatacctgccgtaatggcgatctgatgtccaaaattccttgaaaaatcaataattttcactctcggatcgatcaggctgtgctctcttaaaatctcaatactgcggtctttgctgccatcgttgacaaaaagcagctcgtagttttccttcgtttgatccatgacctcttttaagcgctgataggtttcatgaatgacaagctcttcattatacacaggtacaacaattgaatattgaatatgtctgctcatgtttttgcctcctattcatcagcatgtagttcgtataatgttgctgactgattcattccgccaggtccgcccattttgccgttttcacctgaagccttgctgcttgatgtatcagctgaatcagtattttctgttttttgatcagaacttgattgccatttttctgatgctacttcttttccatttttctcaacccattcaacaatgtcattgtttccgcctcttcccattccagaagccaagaagtatttcacttttccttcttttacaagttttttgaattgagtcagtgtgattgccgggtcagaaccgctgtatccaccaatagccatgacagcttttttcgttttaatgatatatggtgccgctgtgttcgaatcggttgtggcgaataggtattcagctccggagttattctcctctagatatttgatcagtttttcatttacagtcgcatcagacattcccatgccttttccgctcattgatgcgagttgagggcctgtttcaggcagtgagctgttgcctccgtacagaagcggtgtacttgcccaatacatcggcatcaccagcaatgcgaggagagctgcaagtgaaacataataactgaacggtttttggcgctgtttaaacagcagcaaagcaatcgctgacaacacgccgataacacctaccccgatactccatccaacaccgatttgatcgttgtagtttctgagaataaacaattcaaatccagttgtcgcaataattgctcccggcaaaagccatgctttccagcctgtctgattgcggtacagatgaacaagagcgacccaccccgcaccgacaagagccgcaatcggcggtgccagcatgatgagataataatgatggaaaaattctgcgacactgaagaatccggcaatcggtacaagccacgcaacccagaacaccgtttccttctgctctacagataatcttcttctttctcttgcgccagcgatcagtaagcctgcgattccaaatatcgcaaatggcagaagccagctgatttgatcagataactcttgttggaaaagccgcagtggaccaggtgttcccgttccaaacatccctgaacctgattgcattttcgaaccggttcctgtaccgcctttccctccgtctccgccgggtccgccttggccgccatctccgccgcttggagggcctccttgaccgccgcttggcatttggccattggatggaggcgccgccatattgccatttgaggatttaccatcgcttgatgagctgttgcttgatgactgattaggcggtgcttgagtgttatcagaagaagacatttcttttgaagcgtctttgtttggcgcaccctggccgccgcctgaattttggcctgtcagccgctggattccgttatagccgaaagccaattccaaaacagagttggtttggctgcttccgatataaggccgcttgcttgcagggatattgtcaacaatgagcggccacgataacgaaacggctgctaatacggctaacgcacttaccaatgaaacgatttttttcttgattgtggcgtttgccgcaatcagatagaacaataagaaagccggtaaaatcatgtaagcctgcagcatttttgtattaaaacctactccaacaacgaaaaatgctgctaacagccagatcagctttccttttctgatcgctttaaagagaagccatgtagcaagcaataagaaaaataccagtaatgcatcaacattgtttgtacgtgctacagctacagctatcggcgtacatgccataacaaatgaggcaatacgcgccgccgtttttccaaatgtcggctttatcagcaagtacataagaaggacagaacctacaccagcaagtgcctgaggcaggatgacgctccagccgtgcataccgaatatcagtgcgctgatcgtttggatttggtatgtaacaggcggtttatctactgttataaagccggcagcatcgaacgaagcataaaagaaattatgaaagctttgcatcatacttgtaactgccgcggtgtaataaggattcaccgtgtcgtccttccaaatgttatagatatttaagaatgcagatgcgagcaaaatgaggaggaggacgatatccagctcgcgttttttcttttccacttatttttcactcctttttgtctaactttgaaatagtgtaacaagcaaatatgaataaactattaataaacaaagacaatatttttgccgaggccattccataccaatcacccatatttgcaaagggttttaagccatttctcccaatcagcatctgatatttcctccctaataaggcatgctgtttaggtcaaaattaattatggtaataaaaaaagccctccggcggcgccggaaggcaaaagaatcacaatttattggatcggtttcaattttgcttcaatttctgctcttcgatgctctagatatggcggaagagcaatcgtttggccaagctcatcaagattttcatctaccataaagcccggtccgtctgttgataactcgaacaaaatgccgttcggttctctgaaatacagcgccttgaaatagtagcgctcaactatgcctgaattgctaaagccttcgcggctgatgatccggtgccacccggcaagttcttcttcatctcttacccgaaatgcgacgtggtgaacactccctttgccttgacgctctcgcggaagatcgtttctttctattaaatggatttccgttgcagcaccgccttctcctgattccagaataacggcggttccttgcccttcgactggttcacggctgatttctgtaaatccaagaatattcgtcaatacgtgtaaagttggttcagcatatggcacagtcagttcaaccggccctaacccgcgaaacgaaaattcttccggaatgccgctctgtttaacaggcaggccatatccttttccttcctcatcagcagtcagcacaagtcgctgcccctcatgatcttgaaatgccaatatgtcacgtccggctcttttggagatgccgctgtgcgttacttgctgctcttcaaaacgttctttccagtaatgcagggcttctgtgcctggaacgcgcaatccaatagaagaaatactgtttgttcccgcatgaaacggtgcaatgcggggaatctcgaaaaacgtcagctcagttcccgggtttgccacttcatctccgtagaacagatggtacattgtcggttcatcctgattgacggattttttgacgagctttaatcctaatactttcttatagaaatccaagtttttttgtgcgtcggccgttaatgccgatacgtggtgaatgccgttaactttcatatgctgtccctccaggttattttatctcgatttcgagatatcatatcataattgtatatttattgttctaataacaaagtattttattcgcatgagaaagtcaacatatcagcttcaccgaaggttcgttcattttctgaattctcatctcccctctgtaccggctaaaatcctaatacataaaacacgaactttgtaaataaaaattatgaattttattcgtttatagaccattaaaacaggtatttctacagttttatctgctgtacacaaagcaaatttcgaaaatcagaaaatttattttatttcacttttctaaaatagggtttacaatatgaaaaaatagattcttcaacatgaagcttcaacatcataggaggttaaggacatgcatactgaagacaacggtttgaaaaaagagataggcctcttgtttgcccttactcttgtcatcggaaccattatcggttctggtgtttttatgaagcccggcgctgtgcttgcttattcaggtgattcaaaaatggcgcttttcgcctggctgttaggcggtattttaacactggcgggcggtttgacaatcgcggaaatcggaacgcagattccaaaaaccggcgggctttatacgtaccttgaagaagtgtacggcgagttttggggatttttgtgcggctgggtgcagattatcatttacggcccggcgattattggcgcgctgggtttatattttggatctttaatggcgaatcttttcggctggggatctggactatcaaaagtcattggaattatagcagttctctttttatgcgtcattaatattatcggtacaaaatacggcggttttgtccaaacgctgacaacgatcggaaaactgattccgattgcctgcatcatcgtctttggcctttggaaaggcgatcagcacatcttcacagcagtaaacgaaagcatttctgatatgaacttcggggcggctattttagctacgttgtttgcttatgacggatggattctccttgccgctctcggcggagaaatgaaaaatcccgaaaagctgctgccacgcgctatgacgggcggattattaattgtaacggcgatctatattttcattaattttgcattgcttcacatcctgtcagcgaacgaaattgtcacgcttggtgaaaatgcgacaagcaccgctgcaaccatgctgttcggttcaattggcggaaagctgatcagtgtagggattatcgtcagcatctttgggtgcttaaatggaaaggtgctttctttcccgcgtgtttcatttgcaatggcggaacgcaaacagcttccatttgctgaaaaactgtcacatgtacacccgtcgttccgcacaccatggattgcgatttcttttcaaattgctttggctttgattatgatgctgatcagcaaccctgataagctctcagaaatctccattttcatgatctacattttttatgtgatggccttttttgcagtgtttattctccgcaagcgagcaaagggagaaaagcgcgcctacagtgttccgctttatccatttatgccaattctggcaatcgcgggctccttctttgtgttaggcagcacactcattacagatacaatgagctgcggattatccatcctcatcggccttgccggactgcctgtttattacgggatgaaaaaacgaaaagcaagctgataaaacggttcccttgtttagggaaccgttttttggtgaaacagaagataaaagttgacaggaaaaacacaacttttgatatactttttacgttaagcagaaagtttttgcaaacttgggtcgtttttttaaagcgaagtaggtcaaaataaggagacacgatttatcaaaaaagtcaagatacgtttttttcgactttacctgttttttttcgacaaaaggctatataataatttgatgtgtgcattgttcattcaaactatggagggtttttaatgataagaagaaaaaaagataagttctcactccttttaacagaaattgcaaagaacatagacgaaactgcagaatattttgtgaattttaaggtcactaaccaaacgactcttaaagaatttgcagatacgttaaaggaatatgaaacaaaaggtgacaatcatgttcatgtcatgattaaagagcttaacaaagcgttcatcactcctattgagcgcgaagatatccttcagctgacaaacagcttggatgatgtgcttgacggaatcgaacatttctctgccatgatggagattttctcaattacttcatcagacgagcatattgataaattcagcggatatatcagagaatgtgcgaaagagattttgattacgatcgagctgctggcagaaaatcgcttaaaggatattcagcctcacgcaatcaaaattaaagagtatgagcacagttgtgacaacttgcacagaaaatcattaaagaatcttttcggaaatgaaacagatccaatcaaagtcattcaatatcgtgaaatatacgaaacgcttgaagaaatcgccgactcttgtcaaagtgttgccaataatcttgaaaccatcattatgaaaaacgcgtaacgaggggtaaaaatggatattctattaatattaacgatactaatagtcatttgtgctctggcgtttgatttcatcaacgggtttcatgatacggcaaacgcaattgcgacttcggtatcaacaaaagcgttaaaaccgcgccatgccattatattggctgctgtgatgaactttgtcggagcaatgacgtttacaggtgttgccaaaaccattacgaaagacatcgtagatccttatacgctggaaaatggctctgttgtcattttggctgcgctactcgctgcaattgcctggaaccttatcacatggtactacggtatcccaagcagctcatcccatgccatcatcggcgctattgccggtgcagccattgcggcagccggatttgcagcgttaaactataagggcttcattaaaatcattgaagcactgattctatcaccaattattgcctttgtccttggttttattctttatagcatcgttaagctgattttcaaagacagcaacttggcgaaaacgaataagcaattccgcagagtgcagattgtaacagctgccctgcaatcgtatacacacggaacaaacgatgcgcaaaaagcaatgggaattatcacaatggctctcatcacagcgaatttacatacttctgctaatgatattcctacctgggtgcaattcgcctgcgcgacagccatgggtctcggaacatcaatcggcggctggaaaatcatcaaaaccgttggcggaaagatcatgaaaatccgtccggtaaacggtgtttccgctgacttaaccggagcagccattattttcggcgccacgtttattcatttgccggtcagtacaacccacgtcatttcttcatcaattcttggcgtcggtgcgtcccaccgcgtaaaaggcgtaaactggggtacggccaagcgaatgctcattacatgggtcatcacgcttccgatttcagcgacacttggtgccatcgcctactttattttaaatatgatattttaatgtcacaccgcttctgtcaaaggagcggtttttttgatggaacaggaaaaccatccggatctctcgaatacaataagcagaacctatttcagatgtgagggattcgaatatggttttattctttcagatcatggtctggtgcatcgtggccggactggggttatacgtgtatgccacgtggcgtttcgaagcgaaggtcaaagaaaaaatgtccgccattcggaaaacttggtatttgctgtttgttctgggcgctatggtatactggacatatgagcccacttccctatttacccactgggaacggtatctcattgtcgcagtcagttttgctttgattgatgcttttatcttcttaagtgcatatgtcaaaaaactggccggcagcgagcttgaaacagacacaagagaaattcttgaagaaaacaacgaaatgctccacatgtatctcaatcggctgaaaacataccaatacctattgaaaaacgaaccgatccatgtttattatggaagtatagatgcttatgctgaaggtattgataagctgctgaaaacctatgctgataaaatgaacttaacggcttctctttgccactattcgacacaggctgataaagaccggttaaccgagcatatggatgatccggcagatgtacaaacacggctcgatcgaaaggatgtttattacgaccaatacggaaaagtggttctcatcccttttaccatcgagacacagaactatgtcatcaagctgacgtctgacagcattgtcacggaatttgattatttgctatttacgtcattaacgagcatatatgatttggtgctgccaattgaggaggaaggtgaaggataatggaacgtgcgtttcaaaacagatgcgagcccagagcggcgaagccgtttaaaatcctgaaaaaacgttcaaccaccagtgtcgcaagctatcaagtcagtccgcatacagcaagaatcttcaaagaaaacgaacggctgattgacgagtataaacgaaaaaaagcatgatcacactaaaaggacaagggaaaacagctcttgtccttattccttttcttaaagggtgacatataataaatacaaacagaggataatgtcaggtgatacagtgaaaaaattggtgaggcgtgtgaagtttgttgattacggaaggtttgggctttccgggtactcgcttcgggtgagggagcgcagtgctggaattataaaaaagttgaagaagaaaaaataaatcccggagcggctccgggatttttatggtctttgatcagcttaattgcgctgcgatcttctctttcgtcgcaggcccgtagataccgtcagcagttagaccgttaacagactgaaaacgggcaactgcgtcagctgttttcggtccgtaaacgccgtcaattccgttgttaacagcgcctttatcagggtaaaaatacagagccgcaagtgctcgttgcacctgaaagacgtgttctcctgatgtataaggtgttgtcaattgaatgataccatcagggagcggatagagctcgggtttttcagcagccgatggagcacttacaattaatacttgaccaacgcgaataagattcgggtcttcgatattgttccactcttgcagctgagcaaccgtaacaccaaatgctctcgctatagatgtaagtgtgtcgccctgtttcacgacgtaagtttggctgccgcctcccccaattcctgctttgaacgaatcccacgtatctaacaattttcgcggacattccttccctgaccaatacttatgagggacgacattggcgagactgatattatgttcagccattaatgttttgatgagccactgggcatttgctgttgcttttgcaaaatcgccatcggcattttcgcaaatttcaattccaatagaagcccggttgccgctgccatttccgtctcccgcatgccagccgttttcatttaaaggcagatgctgataaatttctgtatcatcaactgtaaaatgccagcttgtcgtcgtatcaggatttttcaaatagcgggcatgcgctgcagcatctgctcctactgcggtattcgctgtgttgtgcaccgtaatgtaaagcggcgtcattgcgtagcctggacggttatttgcgccaaccggaataaagtcttgaataatgttaaccattttcatctctccttatttcgtcagattattgtcccttaacaagtcgcgctgttttttccctttttctgttacatagttgtttttaaaccaagcggcaagtgtcgttccaattgtaaatgcgatggaaccggctgaataaagagcgtcagcgagctgattgacctgctcctcctgaatgtccaatggtgatttgccgagcatcagcatggtctggttgattaaagcaattaaaagaagcaccgtcctgatgaccgtgcccttgtcaaacgtgttcataaaaatccccctttaatgctgcagcaggctgtacataatggcgatggctccgccaatgatgcctgtagacactgctgtaatgatggcacctgtgatggtgcgtttaatccacgtggtgttttcttcaattttgtttaatttttcgttcagcgtcatgatttgctggtcttgccggtcagacacgcgttctaatgcggaaaccctctgctcaagtgctttgtgctcgcctttcatgtctgctaaatcctgctgaaacacattcacgtctgcctcttgctgcatctctcactcctccttcacatgcagatcacctcccttccgagggccgagactattatgaaaccgcggtcccttttaccgaaagagtaccgccggtgatactgataatctccatgatgatctccttaaaccctttaatatcaaaggcccatgcctcagcttttcctaatgtactggaggcagtggtagcatcatcagttttcacgcctctgatcggcagtttctgtcctgacaccgatttgccccaaaatttgacttcgctcatttctgctgtgccgtagacttcaacgagtaaatgcgcggcaccgtcaacaggtaaagcagccccctcgctggcggactctgcattttcatgaaagacaaagtcaaatgttttgcgagcctcgactttcagccgtccatcgtgtgtttgattctccgcaaagtcaatctgtaaaggcgttttttcattgacacgcacatccatctcacccgcaccgactgattggtataatacaaactcagattgctgaagattcccgttcacatagcggaaacggtaatagcgtttagaaagatatacccagtccgtcgctgtcaggacgcctgctgcgacattaactgctgctgtcgttgtccaaacattgttgttgtcgctttcttctataaagagcgtaccttcacgatctgcatacgcccagcccttcactttcgaaatcagaactgcgccaagcctgtcctgcccgagctgactgtatgcctcagtcgcctttaaagcagcatttgttaaaatctccgctacgcctgacaaattcgaaacaggtgtcacaaaatcattttttcctcctcgatagggctttacagcgccggcttttccagccttatcgagaggaaattcatattgatacttcaccatcttcatcctcctttgatctaaaaacaggcaaaataaaaaagccttacatggctttaccggtaatttctttatactggtcagctgtgatcagctttttgttcacaccctctgccagatcctgaattgaacagtcttcatatgctaaagcctgtttcaccatatccgttgtcgcccactcataatagagggcaagcacccaataattcattcagcataatctcctttcaaggaaagtaatgatagctttatatctgacaactcgttccctaatgttttgttcagctcttcaagctgcttgcgtgccagcttttcctgtgacaattcttgagcgagaagctccacctgatcaggcggctcgtacggcggatttttttgcagctcttcccaccaggtttcgagttctgcctgagtcggcaacggcgcccggagattccatttctcaatgtatgaaccgttcccgtcattacgcaattcaaaatcctttctcgatactgcgtttggatacttgtacataatggcatcatataagatcataaaggtacctcctaaactctcgggtaatttcttccgccaagctccagaacatcaaaataattgagagctccattcgaatctgtaacatatcgtgttacatccccggaataaccaacataaacataaatttcaacataatctcctgcatcaagcggaactgtaacagatccagtaacagttgcattaaactcattatcactgttattggaaggggtaggcattctaaattgattcattaatttatactttgtgccgtttacataaacatataattcaaaattggagtatcgctcagtattttctatatataaactagcactgactaaatgcattcctgcatgactggctacaaacctattgttttttgtatcaaacaatttatggctatcttttataatacggttatatttaattttgttattttctcctttaataagggcttgacgcccagtagtcccaatattagcgtgagcaaaccctgatatcttttgccacgcagtccagcctgaatctgcccaccaatggcggatccaagtccctacatgatcataacttccactagttgtgtctgcatttccatagaaatactgagtaaagcgataattactatgcttttcattttttacaaatccataagtgagcgggtatcctgtagtgttattggcccctatgtccataaaagtgattccgtatttgtaatcatttccgcttattctcgcatcttggattgcatttgatcctgttagaacagttaacttttgatttgtataatttgtttcaacatagtttttagcatcagctaaagctttatccgctttattttgtgaaccttccgaattctctaatatataccaccctgaataatcagtaccattaactgctacccttgtataaagtgttttcgtagagatgctaaaccaatcttgacgtgtagcccatttatttgcagaggggtagataattaataaacctgttctgttatcatttaatggaaattgattttgcaaaactggatttgcattcatgtaattagtgtctaaacgataagtgccaggcggaagatttaaatcatttgcatcggttattgaatttaatggtctagtaataaaggccgtgctgttagtataatcttttgattggtttaaagcagtatcagcttttttttgcgcaccatcaggtgtctcctgcttaacattctcaacatttccgagacccacttgttgtttagtaactgaatgaggattagttttatcattttcatgaagatctaattctgtttgaactctatctataaaatctgttgttgcaatttgtttccatcctctaaattctccatcagtgtgaaccattccaatccacatcatacttccccaactttggtaagctactattgttttccttcctgaaccgccttctacaatatcgtagttataccaagctgcatcgccttccaccgggttgtttacaactgactgaccaactgcacaataaaatccagaagataatgtaagaatatctgtaccgtcttggagttgtattcttttaccgtcgtctccagtaagtttaattagttgggcagcattccatttgtttctttccccttcagatacatgaactttagaattgcttaaatgagcatcaaaatctgctagtgaggcttgtttcacattttcgacattcccaagtccaacctgtgcttttgttacttggttaggattatctcttcgtgcagcaaaattgtctgtatatgctttggcgtttgcttcagcttgatctgccttatactgggctccggcaggtgtttccttcgcattccattcatcacgttctactgatgtaatatgccgggttgaatcatgattatgttcattaaattccgtctttgaagcctgctgcacattatccacattccccagcccgatttgcgcctttgttgtgttgtgggggttgttcatgtcgtttttgtgggcagccaggtcggtgtgggcgtcttttattcctttttcccagcggttgacgtcatcttcgttgattgggtcgtccggaagccagtctgttttttcttcgtatgccatgtttacaccacctcaaaagtaaatctgaaatcgagtgttctgttttcgctgacgtccaggtcagtctttctctctgtgatcacattgcccagctcgtcaaaaatttgtaccgtttcaatatgcttgatgtcttcctcacgttttgtcagaacggtgactgtcgcaccgtcaatggcgagctctactatttctgttttttggccgttgagcagcacgtgatcgattctgctttttagatcagccgctgtgcgttctctgtatatggttgaaatcaagttaaaaccacctcattgttgttaagagtgacagaataaccgaccttgagctcactggctgttcggtatctgcggtgattcaggatgactgtatctttgattcgcagcgtctcattcaatccgcctctgagcgtatacgccaaatgagcgggtttcatgttttctatcgcttcgatcagctcattcatgtgctggaggtcatcaacattgatatcgacgttaaatcggtattcgccgggaagcaggcggacctgtgcagacgggtttttcaagaaacggtttaccgcctgctcaatggccctgtatgtgattggcgggatgttcgacattttggaaatgagccgcaatcgtctgatctcatcagtgtcgcctgattcccgcgggacgtttaaaattttttcccagcggctgagcccccaagtcgccgtcggtacgaataactgatccgtcagatcaaatatgctgtcattttgtttatcaaactcaggcgcttccgctttcagcagctcggccatttctttaaggctggtgagaaacggcggcagataagctcgcatgtcatcttgtttgctcaatgatcttcacctgcccaagcttaggaatttccacgtcgctcagcaccagattttcagacgtgccgttgatttgaatattggagtagtcactgactgatggtgaattatagacgatattgttaatttgagaaaggcggataacgttgtcttcaaacgccatttttttaaagaggtttaaaacgccttcctcaatttccgacttcacttcatcaattgagtgattgatctcaggcagcacttcggcagaaatctcaacttccttccagaccgcgctttccaccgtgacaacggctccgattggcgcctgtccctctccctgtcctggttcagggtcgatataatctttcactttttgaattaaaataggagaagcgggctcaagattcgcattggtgacgacaattttgaccgtgccttcaccgttccaaagcgggaagatctttgcctttcccacaccgtccacttcctcagcccactctttataatgcattttattggcactgacggcctcacgccgaacccttgtaaaataccgttctcgcaagctgtcatctccctcttcctcgcgccccggaatcaggatttctttgacaatggccgtttctaaaccgggaatggtatccaatgacagtaaattgcgtccggtcagattggcgtttcccgcttcaccaggtgtttcacagatgagcgtcccgtctgccgtatattgaaaataaagattatccacgtaaaagcgggagccgacaggaatagtaactccagatgtaaactctcccgctctgaccgcctttgtcgcggctgtccgttcaattcccgcttccgctgcacgcctgtctaaaaattcgccttgtgcggtatcagaaaaaactagctcaagcacagtatccagccatatataagacttcgcaagctcggccgccgccggggctaacgcattataaatgacgctgccttctcttgtgtcaatatctgcggaaatgctgttcagcatacgctccataatcgcttcaaaagtctgatcttcaaacatcttcgccaatcacctcctcaatctcaagcgttccttcatccgtctccaccacgaaggacacatgaaacgcgtcgccttgtttttcaatctcaaaatctgttacagcagatatccggtcatcataaaccagcgcctcttctatcagtctcggaatctccatctttttatacgcatcagtcgtctcatgatctgtcagcacgtcctgaagctcgtttccgacattatggctgtatatggaatatgcatagcgttctgtctgtaaggcgatatacacgaactgcctgatcgcttcaagcccggtaatcagctcattcgtaattcttccgttttcaaaatctattttgtacgtttgcgaggtttcaatgacttcgctctcaacttcaatatcttcaaactccacttctggtgtcagggccatgttgcccactccttttacatgctaaataaaaaccccttcgtactgaagcggtttgtctataccttatctaaaataaaaaacgattgcccgccagtcagagccgcggtcatgaggcgatcccccggctcgagtgcatcgtctcctccggactgcattcgttttgggataatgatggcgtcttccggtatgatcagtttgctgttttcttttaatttgatttccacaggagaaaccgaaacgacttcagccgggagcagttctaccggagactcagcgtcaactgcgccgactgccaaatgttttatagcctcacttaatctcatcaggaaactccttccggcatcgtattcttttcgacaacatcgatcgtcatcgtatgtttcgttcctttaaattcatgccggtccgtatctacccaataggttttcttgatgccggcctccggaatcgaaatatagacaggcaagccgctctgcacttctgggatgcccactgcctgaatatttttcagttcttttttcacgccctttttttcagcaaggcgtacatctgcccgctgctgaagctgtgcctggttgatgtcatctgtgaccgtttccgtatattgaagcacaccgtatttatttaagcctgaactgtccttggcagaggctttatatgtcttattgtccttctgccggcgaagcaccacccgagtagcagtgtcgtttatagaagtgctgtattggtagcccgtgatattgacgcccgtttcaagcacccatacctctgacggatctggccaagcgcgcaggccgagctttcctttttccgaatacagctggtaatgtcgtcctgtctggcttttcgtctgtttcagcgcttttaatatgatgtcatacaatgtcgtatcatttttaatgacaagacttttgatcgtatggcctgtgtttgcgatcgaggttgtcggtatctggaagtcactcgcaatccttctgatgatctggtcggcccgctgattggaaaacacgtacatatcctggtttttgaccaggtactgcagcatgtcataagcgctgaaggcaagcgtatgctcgtccggggttcttgcaaaaacaatgccccgaaacagctcttttcccttccatttaaacaagaccgtatctccttctgagacactgtaatacgtctggtcgccctgcttggtgacgatggttgcttcaatggaacgcggcgcctgataacgatggccttcaagcgatacgctttctgcaaccagctcaagccactctgtgtctttaatgacgaacagttctatcatcatacatcacctgtttcattgcggtatctttaatttttggccgggaaaaatccagtggcccggctgcctgatgttccgtttgcttcgtttgatcattgctgttttattggcattccaaattttgcgccattgggtgctgttcccgtaaaatctgcctgcaatgtcccatagcgtgtctccctttttcactgtgtacgtcttcggcgcagccttcgacggacgttttgcctttgtttttttcttctgcttgattttccgcggggaagcggttttgtattcttttaattgaatatcaaaggaacgatcacctatatcctgctggccttcgctataggaaaaaccttcaatactgcatgttaaattcactttagttcccgtaatcaaaaactgaaccggttttttggccttcatccatttttcaatttttgttatcgcattttccggcgacgggaagttttgatattctgctatcggactgtatttcttcggaaaaaaagaagagaacgaaatttctttcgctccctgctcgtcaataaatgtaaggtcaccgaacttggctactttaaccgtctcattctgaactgtatttgaaatactcagctggtcgggaagaacggggagccgcagcttgtccttcccttgtgaaatccaaaattcatatacggatttagtcaaatgcaacgactcccttcgttccaatattgatatccttttgcagttcatctataagcgcctgcttgatcttcgccgctaggctttcggcgtcttgtccattatggaagtgctggtcaccgttaaattgaatataaatctcttttgatccagaaaccgctgcagtcggccggctagccgaggtaacagctgaaacttgtcctgaagaaagctcagactgctgggattgagacggatctgtcacttccataccaagagcctgtgccgctctctgaagaaggtagcgaccgcggatgccccgttcctctgggatgatccattcccgcttgtttccttcaccgacacgggcaatttgttctttcgtgatcagcccgccgtttgcataaccgacataaggaccgccacgtttcaggcttttaatgccaggtacattatcaattgagccgtatctgcttttgatatagccgatcgcggcagcagcgttgtgaatcggatttctaatgttacccatgcccggtgctttatgagcattaaatgtggttggaactgtctgcatgagtccttgtgatggatttcccgccttcgcgttgctatcccacaggttaatagagttcgggttgccccctgattcatactgtgcaatcgtcattaatcccgagagccagctcaatggtgtctttgtggccattattgctgccataagccactgtttcacatttccccctactgcacccattccggaataagcagctgccaatgaaccggcttgtttttctgcgtattttttcacatcgacagaatccagtccttttacaacaccgacagaggcaaaacgccccaagctcatcatgactcgagaaggtgaatggatatctaattcttcacggaaagcctgctccactctcttggccatatcctttgctgcttgttttacttcactggatttagaattcatgcctgtcacaaagtttccaatcaaaccggagccccagctgttcgatgtgtcttttgaacgcaggaacggtttgtcaacatgtgtactcacatactgtgcagtccctgtttgggttgaattttgtccttgcgcaaagcctttgaccgttcctgtgccccatgaagacgatttgctcacagtggcttggaacggcgttttaacttttgattgcaaaaagccgtctgttccggttgcagtgccgctttggcccttggcatacccacttaccatttgtttaccgtaatttggtgaagcagaaatcatttgtgtaaatggtgtattgatgtttttctttttccagtcttccattttgaccggctgatcgctgatgcctttaccaaagccttctgaaaattgctgtccgagtgtggacgcttggcctgtaagatttgcagtgttcattactggggaggctgtgcctgatagaggactgacagctgctcctcctgaaacagatgctggacttccgccagaagacgaagctgcgcccatgtcgtctacaacttgcatacccagcttagacgccgcttgtgaaagaagcatcttcccccggcctcggttgttatcaaccgggataacgaattccttgccggcttcaccgatccacgagatggttggtttggtgatgtagccgcctgtggcgttctgatctagtgcttgttgaaaaacagtcatattattatttgatggagattgagcaaaaatgttattagtagttggtttggaactagtttttttctctttcgaatcctttttgattggttttttcttgaggtgagtaacttcttcccccctgtgtattacttttgcaacgaaaccaccaactgaatcttttaaatcgaatagccattgaaatttctcagcaattttctctgatactttaaccaatggatctttcacatgttcattaaaccaagtttcaattccatcccatgcatcctcaaaaaatttccttgcatcatcgaatttttcttttattgaagttttaatatcttctacttttttgacgatcgggttccatacattatcataaaaccaattcgatactcctgtccaaatattggaaattattgtccatgcatcattgatcttactccaaatccatgttgccgcagtggttacggcttcacttacaggattccacacattgtccataaaccatgttgaaacagtagaccatatgcctgaaataaccgtccaggcgttgcacaatccagtccatatcgttgtagcaacattagtaactgctccgcttattggatcccacacgttatccttaaaccacgggtagacaatgttccatactgccaatatgccatcccaggcataggcaaacaatcctactataaaattaattacaggtacagcaacattatatataggtgtaaacacatactggtcaaaccaagttgaaactttactccatgtatcttcaatccaagtaatagccccattggcagtatcagaaatggagttccattttccactccaccactctttgttaaatagtgaattgcttatgctctcctttaacttagaagtatcaaacatcttaccaatgttcttacctgcttcttcgccgccgattccgcctactaacccgccgccaattccgccgattgcgccgccgattgctgtaccttccggaccaacgaaagatccaatcgttgcaccagcttccgctccggctgttgcaccagcttccgctccggcaatacgtcctccaattgaaccaaccttttcgccagcattatctttattgattccagctaaatcaaacactgctaaagcagatcctacgtatggaacagcctttcccattcctctgaacgctttacctagtttagatgaatccttccctagcgattttaagcctccaagccagttctttaacttggaacccgaggtcctaggtgcactttcagcaggtgtgccgctctggcgtcttcttatcacctctccaggaaccttgagtgttctgtttggagcctttgtgggacttttcttttttctataggtttttttatttttagtgcccgggctgataccgccttcacagcagtcacagcaacaatttcctcctgtattacggttaaggacttttttatctgtgtcagaattttcaccagaatcgtcctttttttgtggtcctagaattttatcaatgatcttatcaaacacatcatttttcagcttttctatcaatctctctttgaaacgatccaaaaaagctttgcctatttcattgagcgtatctttgatccaaggccaagctgattttgtccaccaatccttcagccagccttttatttttccgacccatccaggtttttgatctgagtttttatcagagcctttatctgaggatttgtctgattctttcttagaagtttctttgttaatcaggctttcttttttattgattttgtctgatatttttgtcttaacaaccacttttacataataggttttttcaaatttccttagaagggctgttaatcgattaactgttttggtgatttcatcgatgacctttagttttactgtgtatccgtttttcaaatttttcttaatataaccgataatccttttaactgtagaagtaaccttgtcatctggaatcaaaaggaatgatagcttttgattagaaagcatcttctttatttttttatacgcagctgctgtccgatctaccaaagagacagtcagcttcgtttctttcggcagccgtttaagttttctttcaattgcatcaagctttgaagtgacttggtcatcaagtacaactttaatttcaagcgatttcgcgaatttcaaaatgatatagtcgtttatttttctcagccggtaaaatgcctgatcttccgctctgatactgattttgatttgccgattaatggttttgacttttttttcgacctcttggaatcctttatgtatccgttttagttttttagataccttgtcttcgagatcaaaacgggctgttaattttgcgatattagttccctcctctccttgattctttttctaatagatctagcttataacctatcaacccaaataaaagagctttaaaatgttttggtgcttcatataattcaagaagttgggatggcgagtaatgaagctcatgcattgcatagtacaaatacacagcttccttatcgccatcctttactagttttttgcttcttcttctagatcttcaagatcatcttcaaaaccattgatttcaattgctttattcagccagttcgcatactctcccccaacagataatacacgtttggcaacttctaccggatccgcagttttgtatgcttcccttaaatcttttgaacgaaaatcaggataaatagtagattcgatggcaattctcgcataaaagcgctgggagtctaaatctttgacacggccgcggcctttcacatttttaaatgtggtgttttctttctctaattcatcaatccgttcagtagtaattggttttaaaataaacggaatgacattcccttttttatcaacaaaacgctttgagatcggcactttgatttcctcagcttcaattgtttttcccggcataaaaaaggaaagatcatatacgttttcgttcttctcgctcatgtaaaaaaactcccttgtctattgtttggtttcatctttaaaaaacagacctttctgagaaaggtctgcgtatgggctgattcagctttgattaaaacgtgtcagatagcttttcagggacgtcgaagtcttcgaatgtaaatggaacttcttcctctaacgcttctgaatcgacatcaaggcttgcgattttggcagagtcaaagttgacgtcgtacagcgtgactcgctctgtgccccggccggaggattgatcatccagcacagcttggagcgtgaaataagggtcgctgccttttttgacatagtccatcatcaatagcacgaattttgatgtgactttgtagaacgtcgcggtccctgttccatttgcccctgttgttttatggcctgtcatgcggcggcccataatgttgacttcagacttgtttttctcgacgtttgcttcaaaagttttgatgtgtgccatttcctcaccatcgaggaataaacggccttcttttcctgagattgtgttttgtgcttttaatgccatattagtttacctccacattaaagtagaatttttctgctgcgtcgacaggctgtacagccaggtcaatcaagaagccgtcacgatcttcattcattgaaattgtgatatcttcatcggaatcaaagccagtgatgccgcctgcgtcctgaagcgttgtcatgtattgtgtgatcatcgtttttacatactgcagtccgtcttcagatgccgggatatcgcttccgctgccttttcttgatttaattaaggctttcagctcgcgtgttaaatcattattcacagcatccaggacacgaacgattttgttcttcgcaaatttcttgtttttctcagctgtgaacgtcacgagtgagttaatatccttttctacgctgacggatttatcacgggcgtcgaatgtgaataaaaattcacctttacccagacgttcaacaatcgtatcgtggtcaaggcggtgtaacacatcaactgcgccttcgtactctacaaatgtaagtgattggttaaaggttgctcctgcactcgctccagctacccaagctgttgctttgtccggtgtaacttccgtgccatcttcaagcagcacaccctcggttacgttgatgatgccttcataatcaccggcataattggctgtgacgccttgcactttttgtccttggccgtcgcgcaggcgtttaatgaaagcagcaaacgtcgctttcaactggtcaccttctgcaacaggcagcgcaatcacatcaaagctctccgtttcagccgcggctaagaaatctgtatagtcggagttgacaggggctttatccgtaccgccggataaacggatgcccgcggatgcattcagcgtctcagctgcagtgtctccttctgatccagtgagaggaatcgttgaagaaagatcgcctgttccggtaaaagtgacatagccgttagctgttaattcttcagcctttttgacagtctgtttatcaacctctgattcgtccatatatgttgtcacatcgaaagaattagcatccagcacattttgattgatgcggatgataatgtcatttccttttgttccgccatatactgcagttgctttgacgccttcagcaatatcagcagacgctcggacaccttcggttagacggtacatcaataccgttttcgcatttttcttcgcttcacgcagcagcaataaagacgggtcatcaatgctgaggcccacttttttgtttaggtcttcaacgctggaaatggagacgaacgttttcgcttcgccccagcttgaggcgaccggaagtgcgactgttccccgttcactgagtgatacccgctcctgtgccgtcgttttaaagttaaaataaatgcctgcacgttctttttctttgcctgttgtaaatgttccgccattcatgatgacatgacctccttggttagaaatgtttgaatcaattggttggcttctgatttcgtcatacgtggttgatccacgccaaataaagccccctgaagaatatccggcttaacgccgaacagttccttcgcgtgcttaatcaaatccgctgtatcaaatagagcttcccggctctttgtatgtacagccttcttctgttgtttgtcctttgacaccgtttatttcaccccgctgttcatgtcgatatcctgtaagacaggctgttctgttttgtgataataatatctgctgctccacctgatcaccatggccgcctcgcccctgtcccctacccttgtctcgatttgggagatgcgaaccatatcccccgtcttctcgccggattcactcagcagcggaatcatatttctcgcttctctgatggcatccgcgagcctgtccgcttcatccagcgcctgaacggagtccagatgaaacagtttcacattgagactgtaggtttttttaaatgtggagaccgtatctgtttcctcgaaaacagatggtggcgggacatataacgacggcacctgaaagtgatcaggaagctcgcgttcataaatgggaacagaccaccggctgtacaaaaacgccatgatcgatcctgtttcactgttcatcctgctcctcctttacagcttcttcagccactggcgcagtttgctttccagcgatttttcaaacagctgttcatataaaagcagtgcatgatcccagtagcccgtgcccggtatccattttctcttgagcgccattcccgttgaagccgctggatcataaataaaccgtgagccttgaaaacgccccggcacccatctcacatcttgttttgacgtccaatggccgtcattaagaaatgaggcgtaatcaagctgtgtccccacctcaagcgaaagcccgccgctttgcacaatccagagattgtcctctgcgcctttctcaaaggaactgagcagtttttctgtatcaatcgtttgtgtgctgatgagttcagattggacgatctctagaaaatcttgcccgcactcctcaagccaccgggacgcctgtctggaaaaaccgcctgaagccgcttcttttaatgccgtgttcagctgtttcaatcccgctattttcataggctttcatccctgactgcgacgacctcccaatgatgatgtctgatccttttcggcagctttagtatatatttatgattctcccaaatgattttatcgttcacgcggatgtccgctgacaacggaaaatggacgagaaagctatgatatacagtttgatccggctcctcctgaatcagctgctgtgttttttcggtaaaataacaagggacatcttgttcatcgggtgtatccggatatgaaatcaccggctgcagcctgtctgccggaatcccaaatcggcctgcagacggcgcttgcgctgcttcatgataaatatcgcagcggtgaatgagcatctgcctgtagctcataaagatctcaccttcagtctggaggattcagggacgtagcccggcttaataaactcttcgagcaaatgatacacctcaggccgctgaatcctgccttctccggaaaccgtgtaggaataatcccccattttctcatactgatagcttgatgaggcagattcatcgctgttgacaagcgcaaaatactgggcaagctttactaaagccaacttcaccttgccgggcagcggatcatacaagctgtcttcaaagcggtggcccgtgatgagagccgcttctgcttccgcctcgatgatatcctgcgccagcagctcttccggcctgtttttcacccgatcatagaccgaataggaagctacgtcagtcggttcaatgagcatgagctgaccacctcgtttctattattcttttacgttaattaatttcgcgcaggcatcctcttcctcgaacttgctgtccagcttggccgttaagacaataatgaatttacgggagcggatgtctttgtcgacttcaattcggatattgcgggagaagccgagaatgatatttttcggatgtgtgagaatgatatcagaagcgtcatattgcgcgtctccctcaccgactgtgtacggctgaatattggatacccctttgaccggtacgccgaatgctgttgacaagccgccctgaacagcttggtccccaaggtttgtctggcggtctgccacgcggtccttccattcaacttctaagccgtgagacgtatagaatctgaattcctgagggatgcgcaaatatttcggcggaactgcctttaagcccttcttgaatgtcgctctggacagttcttcaccgttcatgtcaacgatatgggaaaccgcctgtttacggatgccgtccagctgtgccagatacggatcagctgatgctgtatcgccgttaacgatcagctcttcaatatcaactgctgcgcgctctgctaaaatttgcatgattgtctgctgcaggccgtctttttcaatattgttttcaagtgtgtcatacgtaatgttgatttccgcaatgacttccttcgtgttcagctggacagtgcttgtcgttggaactgtcagctcgtcgtttgacagtgcttttccttcttgcgcagcccgcagaatacgctggccgaagccgattttttcaaatttttgcgaatcgttttccatttgaatcacgcgggattcactgaaaatggtcggcgtgttttgcaccatgcggataaaagccgatgcttgcgcagggttcataagcccgccgctttttaaagcagaaagcgacatttccgctttccgaatgatctcttgatttctcaattgatttcctcctccttgactggttttacagcagtccgctccagattgattttttgacttgctctgtattgccgcccgtatcgtccgctgtctgcttagacgcgcctcgcgctttttccaaagcctcgatgcgttcgatcagcggggcaagcatgtcttcaacgagctttttcagacgctcgtcatcacccgtctgctccggcttttcctccgtgtctgtgtttttttcaatccgctcaagccgtttgagcagagggtaaagcgcatgctcgaatgattctttcatgtcttcttttctcatttcttcagtctccttccctgttttgtcagcaagcatttgcttgaatacactaaagaaccctgctttttcgaccggttcttcttcatacacatctgcagtgccagccatgctgtagccggtgataattccagccttaatctgttcccacacctcgtcagacgctcttgtcacgagtacccatgagccctttgtaatccgctttgatccgatcataaaatcatcgggcgccacataggactcgaccacgacgccggttccgccctcaaagctgtgattgatatcaatctcccgtgcctccgcgagaaaaccgtgcgccgctttttcaatttcctcggcggtcataaaatcgccgtgggcatcaggaacatcaggctcatacacgattccgtacacgagcttttgttcatcctgctcactttttgtaaacagccgaacctttttttcaaatgacggaggttcggctgacttcgtaaagaaaaattctgtctggttagccgccttgtccacataactgacaaagctgattttggcatttcttaattctcgcgccacctgcttgattcacctcccttcaggacgttttgatatcttcgatgctttctttcagctcctgcatgagcgcagccaggtttgtcttttccgcatcctgtcctgcaggccgtttataaatgtcctccggccactcctcaagtgttttgccaagcacccgtccggcaaggtcgcgtaaatcattcggcgagactgctccggctgtaataaaaggaccgagcaccttcgcaatctcaagcggatcacgaaagtccggtccttttaatgtcagcctgacgtcatggatattcagctccggcaaaagcagcgtgttcagtttattcacgagagtttttcgctccggctgaaaaacctgctcctccgtaatttttctagcagtatccgctgtcgcccggttgtattcctgggcctcgcctgtatacagcggggggagacggaacgcggaacgcagcttatttctgcttttttcatcgtattcaagaaacaaggcgtcgttttggagaatttcagccaaagatttgatttccacggaaaccggcgtaatatcctcgcctccgtggagatccttttcttttgcgattccttccgcttcgatcaggagaaatttatgggcgttctccacgccttcaagatcattcatgtattcctgcagctcccggtaagaagcttcagacagcatcccgttttccactgtaatcgcagcggggacgtgacgcccctgcttaaaatacataaaattgagctcttctgcttttcgggccccgtataaattgacaatattgccgatccagcggggtacaccgtatacgccgcttccgattttgaggtgaatggcttcatttgcttgatacttctctgccaatgtgtttacatattcacctgtgcgaatatccatttttcgcggatcgccgtattctttaaaaaatactttctttccattgatcatctgcacatattttcggaagcgtttttgccttttgatccttttcattttcccgttttcttcatatacaaatgaaacctctacaggctcgcctgctccgcatacacgcatatatttcacatctaaatattcgatgccggcaggttttcccgccccgtcgcgaagcacttccataaatccgttgcctgttttttctctgtcttcgatggcatagcctaaaatcatttcagctgattcatcaaagtgaagacatttataaaaggcttcgagtctggcccagtctttttccgctcttttcttttttgcctgatcgacatcacttgcgttgacatcaaatgtgtactcaacatcgaatccaaagcctgtaatattcactctgtacgcatcaatgcattgctgaagaatggtcgagtattcggcaatggttttgagctcgatgatattatagggcggagcaataatgtcctctccgtacagctcagaaaagtcatcttcatagatttgctttgtctgaggagccgcggcattggctttaaatacagttgctctgactgtttggttgtgcatgatttatgacctcctcctttctcggttcggccgcattcgtttgtgtgctgtctctttcatatcagcaacctcataatcatcaagcgcataccaaatggcagaaagcgtatgcgggtcaatcgtgaattcatcctcaatcagagctccgtttttatctttggcatacgtaagtgtctcgagctcatagatgacattttcacagcggtccgaacagaagatttttttgaaccgttttacctttttggtatattgaagcctggagccgggaaactttctggctccaaccatccgaaagccctgctggcggaaatattgaatgcttttcggctcagccgagtcggctttgatcaattcctgtgtctcaataaactcacgcagctcctcagccgtcctatcatctgtcattttattttgataatactcccaataaatgtagaggtattttttttcaggatctacagcaagccggacgacggcattataggattcctcgaatccaaaatccatacctgtacgaaagattggtttgctgatggctgcgatacattttttcacttgatcatgcgggagtacctcgaactgcggcagcaccctgatcccgttgacgccgaatcgtccttttcgggcaatccggtacaggtcgggatcatactctttgagtccgtcaagctgtttcacatagctttccgggagaaaaagattgtcgttagcggtggaatgatggtaatacgtatctccctttacaatcgtccgcttttcgtaaagttcgctgtcatccagcacaaaccgtttcttgcgttcatcccgaaaaaaatgcctatacgtccaattggaggtgccgacgggattggtggtacagatcatatgaagctttagctcaggatggcgaagacgtccgattaactccttgaacccctcatacttcacctctgagcactcttcaatccatattaatgaaatgttatgaaccgattttaattttgccggattgtccattcctttgaacatgatccggctgccattgtgaaatcgcagctgcagcggggaagaaagagatgccacggcctttgtgagaccgagctcttcgatcacctcttgaaacaaggcgaaggtcgaatcccgatgggtatcgaacacctcccggatcacaagggccgtccgtttttccttcagcagctttagcacgattttcaatgcggtatgatagcttttggatgagccgtagccgccgacaagaaactggtacgtctgctcccaattgaacacgtaatcttcgaaatgagggttgatttcttttacaatcatgacttgcgctcttttcgtttgatcataatttcaatcggctcctggctgtcatctgttttctccgctttttgtttggcaagcttcaatttctcattttcaattttttgtttaaattgatctggaaacaaatcaaaatataaggatagcttctcaagcgccttcattttatctgcaagcttgatggcaatgccttctttcccaagctttgcttccgttacaatggtgccatcaacgagcccggagtctttgacatcgacaaagctgatttccttcataatcggattatcatcttcatcaaacagcggacccgatttcccgacagcctggacctctttttttccaaaggtcacatagtccgtaatatccgcaaacgcgatcttgatataaacctgcagcacatccatcgcttcaataaacatttcattgaccatttcttttttaatgcgtctaatttcagcagcgaccttttcgttttttaagagtcggctgcccgtcacatgagcgctgtccggagaatagcccgctttgattgctgactgtgtggcattgaagcttttgacgtaatacaggcaaaacagccgctggcgttcatttaattcatcgttgtttatagggcgctgtttttgttcgtttttggacgcagaaaacagcgcctctttccatttgtcttgttttttccagatgccgattgttttcgcggaaacaccgattgtgtccgcaatcgcccgatttgtgatctttccttgatgttgttgatagattgctaatgcttgttcgcgctgttgtgttttcatgctactgcatcaccgccacctccagcatggttgtttattcataaaagcggctgatcagccagccgcttagtgtcatgctctattcacttataggtggcaaacgtatgacaagctttcaggcaagtgatcgattcatttcttcctgctgtctttgcatctttaaactcgcccgtttaatcgtcgtttgcactgtcgatttttttacgccgagaagatcggcgatccgttcataagaaaaacattctaccttatgcagcaaaaacatttccttttctctgtccgttaacagggctaatgcttctcgaattctatctctgtcttcttctgatacctgtccgtccggctcaaacatcatagcgctggaaaatgattcgatgattctcgggtccttgatcatcagccgctggtaaacatcacgccggtcaatcgcccgtctgatgccgggctgccttcctttttcaagccattctgttacatattcaagatcagtaatcatatttctgatgatttttttatccttcagctcttcagctgagagcacggattcatctgcctcagcgagcggtttatattgtattcttgtttgtttgagcgtgcgtttatattcaaatagtaagtcttgcattctatgatcctcctcatttttggcaaataaaaaacggacaccaatcaacgcacaaatgctgtgcagttgatcagtgtccgcaggctttccgtcttggacgtattctgttttcgctttaatttaatttgtagccgatttcaaattccacacgagcaagatcgccctttcttgtttcgacgagcgtttttccatgctctggcgcttctgtgatccatgcttcttgcttgatgccgtccacaataatgacacggattttcccgtcctccagctggctcttaagcgtgacggaatcgatatgcagcagttttttcggatgaatcatgttttatttcctccccttttcggtgcagcgcttgcttcagctttttctaatagctgaatgatacgctcctttgaatgaatagaattccctttcagaaaatcaagtgctgctttagacgcttccagcaattcaggcgcagcggccatcaaagaggcattgcttttttgcgaataagagctgaggtcaaatacagctgcaatcagccgcccgtttgagtacggaaatctttctttttcttcttcactgtaagctgaataaatatagatcggtttcgtatccccgcacgggacagcacgccacggcgcagggcttttctctgcctgttttgtctttgccaacactttcacttcccgtcgtccttataccattgttcaatgtttttttctgttcgctttgcccgaaacagcaaagcgattagagcagtcagctgtttaatcatagatattcagcctcgcttttcccgctgtcagcatttgctccagcttttgaatgacaggcgttaagtcagtgccggaccggcagttcggacatggatgaaaaacaactccaataccggtatgttccacaatgactttctttgtttgacaaagcttacacattatctgacgccctccaatctatggttaagctcgtaggctgctcctttgataatcactaaatagtcactgcacatctcatagattctcgtgccgagcgcttcatcgacccgtacaagtccttcaattgtcagctcgctcgaaagcaaaatcggtttatgatttaagtagcgatagttgagtaccgaatacatttgctctaattgccaatctgtagcgcggggtttgccgttaaccggtttaaacagatcatcaatgaacagcacatccgcctgcttcatccggttcagcttcgcttctaatagggcaaaatcatttttcagatcagtaaagccttccacgaacggaaaataaatgacaggcacatagcatgttctcattaattcgttggctgcggcggtcaaaaggtgtgttttccctgatccgggctgtcctaaaagggcaatgctgttttttcggcaatccttgatttgttcataatcggcaacatactcttttgtacactcaaatgcgtcttttatggcctgcggctttccctccgtgcggaattccttgaagccgagctgtctgaaagcgtgggtaatctcacttgcacccagcagccgcttcacttttcgttctgccatgcagctgcacatcgtccagacttccaggccattctgcctgacgagataacctccctgatccttgcagcgcaggcaatcatacctgcttgcgtctgattcggccggtttgtccgccagtaatggacgtctccctcttctcagctcgtccaaaatctgttcgattgttcgttttgtcatgttttttcatcctctcatgctgaattgcggcattctttttggcttgctgcgcgaaaaatcgatcttcaatgaatttcgagcagtagcgaaaagccttgattgtttcagaagcggcggtccgccggttttcaaaagcctgaaagcattcttcaagccatttgattgtttgcgtgacaggaacgccgatggcaacaatgcgggcgatggcttgataatctcttgaggaaggatacacggtgcgtccttcttgagccgaccgtaattgtgtaaaccgcttcgcaatgtgatccactgcatcatcagcagcagtatatttgtttgttttatctatatctgtacggtcgtttgtgtccggtgtctgcggcgaaaatggccgttcttttagactcccgtgtacagtattgtccgatctgaagctgaatttttttgaatgcttgaccgaaatcatcagtccgtatggcgcacggacggcctttatgtaatcatggttttcgagaagctccagccatcttctgacggttttttcacttacgccgaagactgccgccatttctctcgcttttaacggcttatggccgagtacgatgccccagcttacgccgtctttttcgatttcttttgttgttgagctgataaaccagagaaacagccataacgccgggccaattttgtcataatgttctgaattcaacaaccctgaatacgtcggaaaaggatagcttttatcgtttttcattgtacgccgcttctccttttaacatcatgtatgcttgaaactgttcctgcgtttcaaagtgaaacaccggaaggccgcatgcggtaaacgaaatggtgccgccggattgtccgagatggcgctgatctatgggattttcactaaaaacgatttggatcggatacatgtgatcactctcctgatcttttttgatacattttgtatcggatgttaccaagtataaacgatacattctgtatcatcaagttatttttgatactttttttatcataactttattttgatacattttgtatctataatcataagtaacgtagggagtttaaaaaagagaggtcatagtatgataggcggcagattgaagagtctcagagggaaaaggacacaggaagaaatcgcatcacacatcggtgtgtcacgggcacgatattcccactatgaaaacgggcgaagcgaacccgattacgacacactccaaaagctggctgattactttcaagtaacgactgattacttattaacggggaaagacaaaaaatccgatgacgatatgttctcagatccggacctgcagcttgcataccgcgatatgcaggatttttccccagaaagcaaacagcaggccatcgaatttatcaactatttaaaagaaaaagagaaaaaccgcaaaccgaaaaataaataaatcgttctctgttctctaaaacatataaaaagtagaccgatataaagaaaaaagtgtttattttttaaagaaaagggaaagatttctacactaccttccagtcctatacgggcttttctttctcgctaaaaacagaacaaacgttcgaaagggagtattcaattgggcgattacttatcacatctggaggaatacgttaaaaatttatacggccggctgggcatcacatcccctcatcacattgacatgctgaaaatcgcaaaggatctggatatttgggtgcattttgaggatatggggagcatgatggtgaaatacgacggcatgtacagtatcgtattgaaccaaaaaaagtcacgggaagagcaatgggaggattttggccatgagctgtgccacgtgttaaagcatgcaggcaatcattttcagatgaacaagctcttcagagagcttcaggaattccaggcaaatcaatttatgtaccacttctgtgtgccaacctttatgctgttgcagatggaactgccgcaatggagaagccaggcactcgccacaattgcggcggtattccgggtaacaaaggaatttgctgataaaaggcttgacatgtttgaacggcgtaaagcaggtattcaatttcagaagcggctcgcttatttattatctcacaagcggccaaatgcgtacgaggaaggcgatcagcagcacttgcaggtcgctgaggaaaaagcgttatatcatattggtaaaaacatctgatcaaatacgggctgaggatatattcctcagcccagaagagaacctaacatttcgacattgggggaactgtattatgcagccacatgggcgccggtttaagatgaggcgcagatgcgaacgcaatcggagccgggatatacctgaattcaccccggccgtcaaaggcttccccatgtgcccatcttccttgtgagctttcatctcccctggaaaagttaaacaggtcataggagacttcctgcttttcgagctcacgcggaaacgtcgtcgggacgacaatatcccgttctctttcctccagctctttaatggccgcgtaccacatattttgatgataggtatcccttgcaatcaaaaatgacagcatatctcttacccctggatcatcggtcatggcataaagccgtgtcacctgaaggcgtccttgggcctccgcatttaagttagcgcgaaaatcggccagcaggtttccgcttgagataatgtattttgcattccacggatagccctcactatctgatgccatcgcccccaatccggacacaatcgcgtgctgagggttcatccctgacatgactgctgcaatagcgggattgcttttataagcatcctcctgtacatccgcgggtgcattgtccagaagcctggaaatcatcgttgccagcatttctacgtgcccaatctcttcggtccccacatcatataacaaatctttatacttagcatccgccctgcagttaaacccttgaaacaaatactgcatcatgacgctaatttcaccgaattggccgccgagcacctcttgaagttttttcgcataaaccggatcgggatgagctggctttgcttgatattgaagctcttttatatgataaaacatgaatcattcctccccacactttcgcacaaccccagcgtatgaaggaataggccaaccgtgcaggtcccgtctagttttatgtataaaagccaagcttgacggcttccacatatcgatcaaacaaatcgttttgtatgtagcttttatcacggcacccaaaattgcggaatagcgcatttcgctgtgccgtgcttacctccaattgcagtcccatttctcttttcgtccgattgacaatattgtttgggtgtacacctgccaggcggtctttctcattagtgagctcggcgctaaaacccgcttcattcagacgctcacaaatgagcttggcttttttacgatccgccccgccgaccaatgtatgcgggattttcggatcataatacccgtgaaacgctaatgcgtaatggtggtcattcactttttctaaagccagcggctcatcaaaacgaatgctagtgagatgcaaggaacggttgtttcgctgctttagaccctcaaacaaatagatggaacatcgatccgaaaatgcccgcaccagttcactgacgccaggctcaattctgccgccgtgaggaccgaggacgataagctcacttccgtttttctcctcataaataatccggtactccgactcagaagcagaaagggccgcaaagctgtcatacatatcttccatcttgaacgcccccctttaccagtcagcaccagtttactctactcatctatgaatgaaaaccttttttatagtatgatttgatagaatacgcagaggaggtatatgatggggtttattgatggattactcggcaatgcatcaacactgtcaacggcagctgtgcaagaagagcttgcccatattttacttgagggtgagaaggttgaagccgcgtttaagctggttcgcgatttgattgtctttactgacaagcggcttatccttgtagataaacagggaattacaggcaagaaaacggaatttcaatcgattccgtacaaaagcatttccagattcagcgtggaaactgccggccgctttgaccttgattcagagctgaaaatttggatctccggcgcggaacttcccgctgtctcaaagcagtttaaaaaagatgaaagcatttatgatattcaaaaggtgcttgccgcagtttgtatgtaaggcgaaaagacggaagcttcacagcttccgtcttttcatttacagcttttcctccatcttcgctttcgttttcggaccgtaaatcccatcagccgttaaaccgctgacagactgaaaacgtttcactgcattagctgttttcgggccataaacgccgtcaacgccgtgatttttcgctcctttatcaggataaaaataaagagcggctaaagcagtctgcacctgctttacttttgtcccttgcgtcagcgggcttgtcactttgatcacgccggatgggagcggatatgaggatgcggcatggcttttagaagcagatgccgtctgaggcagtttgatcacctgtccgattttgatgtggttcgggtcagtgatatgatttatgctttgcagcgttttcacactggccccgtgtgatgcggcaatccctgacagtgtgtcacctttttttacatgatattcagacgccgaagaagagactgcagcttttttcgctgatacgcccccgtttaattccttttcaatcgccgccttcacttgatcccagcgcccctctgataaaatgcggtgcgggcaatactttccgctccagtcctgatgctttctcacccgatcgatgccccagccgcgctccttcaacagctgtgcaacaaatgaaatcgccaaggcttcagctgcctcatacttcgggcctcccgatttgctgtagcaaatctcaacaccgattgatttgcggtttcccggaccgtttgtgccgtcaccagtgtgccaagcgtttcggttaagcggcagaccttgaatcacctcttgatcatcgaccgcaaaatgaaagcttgtcgagcttgtgttcccgatcatatagctgatttcattggccgctgatgcatcgtttgccgtgttgtgaatggtaatgtattcagcggacattgcattaggacacttcaacgcgtatttcgcctcagaaaccaaatttttctttactggaatgctcacctatcatctctccttttcttttttcataaataggtggcattcgtaggacgaaaagctcatatcatctatcaccgtaatatggataaatgtgttaaactgaagttcacggagggtctgaatatgtatacatatttaatgctgacaatgagaacggagaaatttaatcaggagcatgtggctgggcactatgaatttctggatcgtttacaggcagaaaaacgtttaaaaatgtttgggccattcagcgacgccacaggcggagcgtatgtcatcgaagcagattcactggaagaggcagcggaaatcggccatgcggatccgctggtggcaagtggatcttctgagctgacgataaaagaatggaagctgaagaaataaaaaagacccctaagggtctttttttatgcatcatgtttgattgcgtgccgcaatatgaaatgttttcccttctgtgtttgctgtttcacctgcatgaaccatcacctgagtaaagctgaacccgaccgcaacgagcaacaaacctgacatccatttagatttcatataaacaatctcctctctggatttgtttttgtgcgtgcaccattttctcataaaatgaaagtgctttttcgggctgtccgttttctatatagaattgggcagcatcatgcgccagctcttcaatataaggatacagcatatgttcttcaagaaattgaaaggtgtgtgagactgattctgtgtcaatgttttttccgtataacgcatgtaaaaattgaaaaagctccacaaataattcatcactgtattgacgggcgatttccaatccttcacgatactttttttgcgcttcggcgtcatttttttgtttatacagaacttgtgttaaagagtagatagaatgcggaagattatcgaacttttccgacttgcaaatagaaacagatttcccaaagtattcggctgccttttgcagttcacccattttctcatagcagtttccgagattatatagggcagaactgatcaggcggggattgccttctttctttgcaagatctaaagccagttctaagtggggcaatgctctttctggatactgcatatcatcataattacctgcaataacgaattcacattggattctgcggacggtgtacgtttcatacatttggtatgtttctaatgcctgaacggcgtagctcatcgaaacataggtttgttttaaattgtaaaaaatctcagccattttaaaagcaaactctgctttctcaatatcatccgagacgagggcaagattcttttctgcccgtttataatacatcatggcactgacaaacatcttctgcttaaattcatacattcctcgaaaaaaattaaagtaatattcgagaagccctgtcagcttgtactgattcccttcgatgtcttctaacaattctgaaaactctagctgcgacgtgtcctctccaaaaggcttaatgtaatccagcatgacacggtgcctgaactccattaaagaataatacagcagcaaatcttggtcttcttccatatcctcaatttctctttctacttcgagcttgacccgttcggcttcagcgacgtggaactgccggatatgagtataccattcattaattttaagcccgacataagaggacggaatcgtctgcttcatcctcaattaatccccccttttgaattacccgagatatgtcatattttatcatatttacaagaaaaagaagaacgcaaaataaccgcaattgtcgaatttcggctaaccgcaacaaaaaagcacgggtttttcaaacacccgtgctttcttttagtgaaaaccgactttgtttctttccatccagcttccccgctggctttttctttgctctcctgtcatgtctttcaccatggtttcaatatggtgattcccttcttggtgccattgaagggctgaagatacatataattctcccagctgtgcaaaggaaaagccttctgtaagttttgcggcgttttttatttctccttcactcaaaaagatgccaaagcctctcattttcatatattccagccgcagctcttcatccggaagcccgatttcataggcacggtcaaatcgtcctgcacgattcatcaaacctggatcgatctcttcgggatagtttgtcgtaccgatgagaaatagcccctcttttgatgtcgcgccgtccagcgtattgagaaaaaaggaccgcacatcttccggcatcgaatctatatcctcgatgaccagaactgcaggagcgaggcgtctcgctgcctgaaagacttcttctattgtctcgctcgacgtaaattcagtaatttgccaataagcaacaggtgcatcgatactgcctgcgatcgacttcactaacgtcgtctttccgtttccaggaggtccatataacagaatgccgcgcttgtaagggatgtcatatgtttgataaaacgatttatcactatgaaaaaactgatcaattgatctgtatatctcttttttcaatagcggattcatgatgacttgactccgctgaacctctctgacaatggcttcctgctctcttgaagtccctccatctccatccgtaaacacggtcactttccgcttgcttttttcccaaagacgcggtctgactccctccagaaatgcacgcatcttttcatcgttaaccgcaaacagacaatcaaaactcataatgctcccatcttgaaaatatggaattctggcaaaagcaactcccttttcaggatacgcgtatacactgtttcttatagacttatggacggtataatccggttctttctcatcttcatcgtaagcaaaggttttcttttcaagcttttcaaatatatatgccacatgctcaggctccaatgaaccgctgcggacatcttctacaagaagctcccagtattccgtatttggatcatcactggcatagagctcatagaatacaccgtattgatcataaagcgtttcttcaatccgtgtgataaggtaaccgaaagtgccgtagcccgccgcagctctttcattctctttttcttcgtactgataaatgaaaggtatgttagtcatgtttatactccatttcatgttttgtgaacgttatatatacgattgacatagcattttgtttcatcccacagcatattacttgtgaattcataaccgttgatataggatttcattgcaccatttatttttacatatggaggagatcataatgtgccaatccaatcaaattgtcagccattttttatcccatcgaaacgtgaccaatgagcttgccgaaaaaatcagcaaagaccattacagctacaaaccggcagaaacatcaatgtcagcagaagagctggtcaaacacattcttacgtctttccacttgttcgcaaatgtcattaaggaaggcaatgcctcaccatttcaaaacaagcaggaagaaacagaaacagatctcaatgttctggcaaaaacatatacagaaaaaacggtcgctatccttgaacagctgactgaagagcagctggacagagaaattgatctgacatccgctttcggcagaaaagtcacaggccgcgcgctgcttcagcttgcaatggagcatgaaattcaccataaaggcaacctgttcgtgtatgtgcgggaaatgggccacactgagcttcctttctatcagcagcgcatgtagcgtaaacaagaaaaaagatacctgttaagaggtatcttttttttgcgcctttagtacttctcgatttcgtccagacactcattatagggcaaatgaatagagatattgagcataccaaaatttcaagcaactaacgtgcaaaaattcaaaaaatttaattgattaacgcgtcctaatcatatataatctgataaaaatagtcgggttttcaggaggcctttatcatgagtgtaagcatcatattgatgggtttgtttgtcggagccttagtcggattgacgggagtgggtggagcggccttattaactccccttttaattgtgcttggaattaatccttccatcgcggtcggtacggatcttgtatataactcgatcacaaagctgtttggcgttgcctcccattggcggcagaaaacgattaactttaaattggtaaaatacttagccatcggcagtattccgagtgcttcgctagccattggcatattgcatttgttccccgcctttcaccagcatcaggaagaaattattaagcacgctctaggatatgtgttaacgctggttgccatttcaatcatcgttcgtttgtttttggatagaaaacttcgccccaaccgctggcagctgatgccgcttgaaaataagagggcgctgacaattcttattggtgttgtgtttgggtttatcgtcggattaacatcaatcgggtccggctcattatttgcaatcgccatgatttacttatttaacatgaaagcgtcacagattgtcggaaccgatatcgcgcatgcttttcttcttgttacggcagcaggcattttgaacgcaagcttcggaagcgtggattacatgctggcagctaatctgctcctcggttcaattcccggcgtactgatcgggagccatctttcgcctcgattctccccgcgtccactgcaatttattatggcttccattattttagtcagcggtttaaaattgatttaatgaagaaggctatccgcttgaaggatagccttttcttattataacgtcacacccgatttaaaaatggcgagttctttgaaatcatttttttcatggttcacaagctggccgcttgccacctcaatcatatagtggataaactcacgcagcacatattcctcatgaacatcatcctctgctaaaaggcctgcgttaaaatcaatccaatgcggcttcgcctcatacagctcggtgtttgtcgctactttcaccgtcgggacaaaggtgccaaacggcgtgcctcttcccgttgtaaagaggacaatttggcagccggcagccgccaatgcggaggaggcgatcaaatcattgcccggtgcgctcaaaagagtcagcccttttgtcttgagtacttcaccgtatttcaagacatccgtgacaggagaaatccccgctttttgcgtacagcccagcgatttatcctcaagtgtagaaatgccgcccgctttgttgcccggtgaaggattttcgtacaccggctgatcatgtttaataaagtattgtttgaaatcattgattaaatcgactatcttatgaaacacttcttcattggcagcccgctgcatcaggatggtttctgcgccgaacatttccggtacttccgtcagcacagtactccctccctgtgcaatgagataatctgaaaaacgtccaagcagcgggtttgcggttatgccggaaaaaccgtccgaacctccgcatttcagcccgatcttcagttcagacagcggaatgtcttctctcttatctcctttggccgcttcatgaatttccttcagcaaagcaacgcctgcctccatttcgtcggtcaccgactgggattccagaaacttcacccgcttcaagttcacatcttgcagtgcttccttcattcttgccagctcattgttttcacagccaagccctaacaccaagacgccgccggcatttggatggcgaatggcattcagcaggatctgcttcgtattttcatgatcgtcgccaagctgcgagcatccgtattgatgctttaacaccagtacgttatcaaatggagcgatatcccctgtttctctgacaaaacgctgcagcattttttctgctattccattgacacagccgacagttgggacaatccacaattcattccgtacacccgcatctccgttttctcttctaaaacctttaaacgtccggttctcattagaatacggattttcatcaaatctcggtgtatagctgtataattggatatcagacaggtttgttttcgtattatggacatgaatatgctctccgatcgagatatcttgtgatgcatgaccgattggaaacccgtacttgacgatgctgtcgttttctttgatagactgcaatgcaatcttatggcctctttttatatcatcctttacttcaatcgacacgccgtaagcatgcagcctctctcccttttgaatatcccgcagagcaagaaggacattatcttgcttatgaatctttataaacgacttcaacgtacctctcccccttgtatgcagtattgttcaagagccctctgcatgcccagctcatgaatatgattcaagtaaacagcgactctatcagtcagcttcggtatctcattgagatctgccccccacagccgctgttcgcctaacactcttgatgcaatccgaagcatgtcgccatcctcctgacaccaaacctctttgaaaaattgaagaactgccggatcatcctgcaatgtctcgttatcatgataaaaatacagaagagcgctgaaagaaaacaccaagcgttcaggaagctgtcccttttgttcagcatattccttaagagtcggcaggtttctcgttttgaatttggaaatggcgttcaatgcaatgctttccaggtaatgcttaatatacgggtttttaaaacggttcagcacatcgtcagcatactgagaaagaccttccatttttaaaacaggaagaatttcgtcatcaatcagctctcttataaatcgccccacttccggatgctcgactgcatccctaacagtcttcaagccgtataataaagccactggcgtcattgctgtatgagcgccatttaaaattcttacttttttagtccggtatggggtgaggtcgctgacgatctttgtatgcagccctgcagccgcaaagggaagttcttttccaatccaatcaggcccctcgataacccacaaataatattgctctcccacaactatcaaatcatcctgatagccaagatctgccgtgatctcatcaatgctgtcgacgggaaaacccggaacaatccggtctactaaactattacaaaatgtattggcctcatgaatccactgtgtaaatccttcctccagcttccacagatgtgcataatgaagaaccgtttccctcagcttttcaccgttattctcgatcagttcacatgggatcaggacacacccttttgtctgatctcctttaaaagcctgatagcgaaagtaaagaaatgcagttaatttcccagggaatgttttttgcggcctatcctctaaacgatctttttcatcacatacaatcccagcctcagtggtgttggagataataaaccgaagcctttcgcttgatgccaattctttgtatgcttcataatcagaaaacaggtcaattccccggctgattgagttgataatcatatgctcgtttaccgcttctccgtctttcattccttgtaaaaaaagtgtatataatccatcttgctcatttaatcgtttgattttttctgagcctcttggctggacaactgccacgctcccattaaaatcagtgtgttgattcaattgatcaatctgccaatcgataaatccccgaagaaagtttccttctccgaattggagaattttttctggatactgagtatagtgatcgtacacatttttattcagcttctgcacccttattgcctccctctcactttatgcacacgttaacatttttctgtataaagaatgcccgctgaaaaacgggacatcacgtcgtcaatcgtctgactgaatcacgcaccataaattctgtgttttccaagattttttctgcttttgtttcgggctcgctgatcagcgacaagagtttttgcgcaccgagcacgcttattttctccactgggcgctttactgttgaaagccttggcgtgatgtactgtgaaaacccaatatcatcaaacccgatcaccgaaatatcatcaggaacgcgcaggccctttgcgaatatcgcattcatcgctccgattgccatgtcatcattcgaacaaaaaacagcggttggaggattcggcagtgccagcagccgctccatcgcttgaaagccgctttccatatcgtactgtcctttgacactgtattcatgcttgatcggaatatgatgttgaatcagtgcggataagtacccttcctttcgctgctgggaggatttaaagccttcgatcccctcgatgatggcgatgtcttgatgtccggactgaatgaagtattctacagcttcttgagagccttccttgtcattggacaaaatattcgtgatggtacgatcatcaatatcacgattcagcacgacaagcggaatgtttttttcgcgaatatggtaaataaaagaattatcaatgtcactttggctcattaaaatgatgccgtcatatctcatcggtgtaacggagtcatagtttttcagatcatcaatgccgcgcacatacagattgtaatcctcacttatggcttgattgacgcctttgatagtgtctgcaaagaagctgtgtgaggttccgtttgtaatgcttgtaaagaatagcccgatcgtatgcgacttttgcatcgccagacttttcgcatttacatttggtgtatagttgagctgctctgctagctctaatatttttttcttcgtatgttctttgatgtaagggctgttgttgagtgctctggaaacagtagtgtgggatacgtttgcgagttttgcgatatcttttatggttaccatctaattcccttccttatcataccggctgcgattatttactgtatattgtatcatcaaacataccgcctctcccactatatttccagattaataagacacaggattctcagcttctgttcccgctggcttaccaatgattggacggacaaaacgaatcacagcaagtgaagcgaagacagccagcccaccggcaagcaaaaatgctccagaaaacgtgcctgtttggtcaacaataaatccggttaaagccgggccgataattcctgccgtgttggcgaggaaatgcatgaagccgccaacagaaccgacattgttttgatcaaccacatcttgaatgacagcccaatagatagcaccggtcaaataaagaaagaacactgacagagcgacaagagtgacagcccccgcagtcgttgccacaagcccggcaaaaccaatcaggacagctgatgaaaacaaacacgtgacaagcacaaccttgcgcgagaacagcacaccttttcgggccgtttttttgtacacatagtcagaaacaaatccccccgcagccagcccgataaatcctaaaatccacggtatgaccgtgatgacactcatcgattcaacacttaatccccgctcgtcgacaagatagctcggaaaccatgtcaaaaagaagaagaggatgtagttgtaagcgaaaaaagcgaacgccgtgaacaggactgttttttgcttcaggtaaaaggtgagcggaattttttctccgggagacgtttctgcttttattgccggtgcttccttgatcgtctcttgcggcttttctttgacaaacttgaaccagagcactgcccatatcaatccaataatcataatgagaacgaaggataccttccagctgaacgccactgcgatcatgccgactatcgggccggaaatggctcccccgaggggcgtgccgctgttggttacaccgataacggacgcccgctgggtcggcgggaaccagttgttcaccatcttgttgatggtcgccgaaagcgggccttctcccattccgaagagaatgcgtataatcagcaggctgacaaagccaaaagcgagggcgactgctccgctaaacagcgaccaaacaaccatcgcgacaaacaaggtcagctttgccccatagcggtcggatgccacgcccccaagaaaattaaaaatggcataacctatcgaaaaactgctgaaaatcaagcccatttgtgtggcagacaatgtgagatcatcctgaataaaaggagctgcaatggaaagcgccgagcgatccaggtaattaatcacccctgccaggaacaaaaaaaggataacgggaagcttatcttttgaaaacatctcaacctcacccctatgttggttcagtttctgttgcaccgctttcgttacacacctgaataagccataaatcctccatcgacaggaacggtgatcccagtgacaaaaccggaataggattcatccgccagccaaaggagcgtaccgagcaaatcctccggttttccgaagcgcttcatcggtgttcccgcaataattttgtgagatcggctggtgaacgttccgtcttggttgatcagcagatcatgattttgttttgtcagaaagaagcctggggcaatcgcattgacccgcagcccggtttcggcaaaatgaacagccatccacatcgtaaaattattgatggatgctttcgcagcactgtatgccggaaccttcgtcataggtgaataagcactcatggaagaaaggttgatgatcgcgggtgaatccgccttcagcagttctttaccaaacacttgcgaggccagaaacgcaccggtgaagttggtggagaatacagttagaaagcccctctcatccatatcaaaaaaggattggccttctcccgcttcttcatatgtctccacatcggttatcgcgtcaggatgattgccgccagccccgttaattaacagatcaacagcgccaaattggccaaggatgtcttcctttgcccgctccagtgacatcctgtccagcacatccgcagcaacagcgcacgctgtgccgccagccgccgttatctccttcacgaccgcttggcctttttcagccgtccgattcaaaatcgccaccttcatgccatgacgggctagctcccgggccatcgcagagcaaagcacgccgctgccgccagtgatgacagccgttttaccagccaggttctcatgcagcgggatcatatgcccacctctttttttgccattgcttcataagcgtcccacagcccgttcaaatacatgatgccaagtgcccgatcgtataagccatatcccgggcggcattgctcgccccaaagatggcgcccatgatccggtctgacatatccttcgtaatcctgcttatgcagttcttccatcacgccttgaatgttgatcgaaccatcctttgttaaatgagatgtttcaataaaatcgccattctcataaattttcacattgcgaatatgtgaaaatggagcgatgccggcatacgttttagcgatctccaccatgtcgttagcgggattggctcccattgaacctgtacaaagggtgatacaattagacggtgaatctgatatcgcccgcagtttcttatagcttgcctctcctgtgataatgcgcggcagtccgaaaatcggccacggcgggtcatccggatgaatggccatttgaacaccataggcctcagcaacaggaagaatttcctgcaaaaagaatgataaattgtcccatagcttttcttcatcgaccgttctgtaggcagcaaaaagctctttgatccgagccaatttttcgggctcccaccccggcagtgtcatgtcggatgcttcctccaccgtccgaatcagctcttgaggatcaaggctttccaccttggccttttcaaaaaacagagcggtcgatccatcttctagcggccggaacatgtccgtgcgtgtccaatcaaaaaccggcataaaattatagcagatcactttcacgccaaatccggcaaggttgcggatcgtttgcttgtagttttcaatataccggccgcgttcttcgttcccaagtttaatcgcttcgtgaacattcacgctttctacaacttcagcatgaaaaccataggattgaatatattcagtttcggctctgatttcttctttttcccacacgtcgccgacgggcttttgatggagagcccaaacgatgcctttgacaccgggaatttgcttcacgtattcaagtgtgactgtatcgttgcctcgtccataccatcggaatgtcatattcatgctcgcacctccggattcagtcatttaatcaaacgtgatgacggctttccgcacctgatctggatgctccttaataaactgaaatgcatgatgaacgtcatcaactgaaaatgtatgggtcaccagcccgttatgcattaaccggcctccattcaaaagctctaccacttttggaaactgattggtctgcaatcgggatccggttatcgtgacttctttttttgtaattggcagctgagaaatctgagccgctctttcatcaaatccaagcacaaccacatgtcccgccggtgacacagcctcaattgaaagtgcaaaagtctccggcaggcaaacagcatcaatgaccacgtttgctccttcattcccagtccattcaaggacccgctcggcaacatgttctgcttggacatttacaacagcatcggcgccgttttctttcgcaaatgccagccgctcgttgttcaagtcagtcatcatgacagcagcgcccgccagttttgccatttttaacacacagatcccgatgggccccgctccctggatcaggacggtatcacctttttccacctggcctctccacactgcctgggcgcctatcgtataaggctcggccatgactgcttcctcccaaggcaagtcctttgagaccgcgtgaagctgtctttccggaagcacaatatattcccgcatgcctccgtcctcatgtacgccaaatacagaaagcttggcgcaaacattcggccgccctttgcggcaggcatagcacgatccgcaataagaaatcggctcaatcaccacatgatcaccgggttttaggctctgtacattcgcaccaactgcctccacttgtcccgttacctcgtgtccgatgactctcgggagggtagcgagcggattcgttccatgataaatgtgcatgtctgaaccgcaaatgccgactcgcttgactttcacgagcacttcatcatcctttgaaagaactggcttcttcacctccgctgtcaccagatcatacgcttttcgcacttgaaccgctttcattttactcacctgctttttaagaattcatacacgctccgggcgatagaaattccgtttttcttatttctttcttcatgcagctgctcgatctcgccgggcacatacactctttcgaatccaacagccggcggtgattgctgcagttcatcaatcatggcatccatctgctctaaaaacgtatcccagtcagtaaaaaaggatggattgatcgcgcaaacgtaatgccccagctttcttttttgatcaaggccgttgtacattttggcaatatgagggccaaaagccgcgcccgccagcaatccggaaaacacatccactacaatcgatagtccatagcctttcgggcccccgaatgttgaaagtgagacgaccttgtcaggatcagttactgcttctccgttttcatcgactccccatccttcaggaatttctttgccctcttcacgggcctgcagaatcttcccaaaagccactttggatgtcgccatatctaggataaacggttttttatgcttagccggaactccgtaagcaatcggatttgtccctaaaataggagtcctccccccaaatgggacaacgatactgtctgtatgcgtcattgccattccgatcagcttttcgtcagccgctttttgcacaaaatagcttagcgctccgcaatggctgctgtttacggccgtgaccatgccgactccttttttcttcgccatgtcaattgcatggtccatcgccatgtcgcaattcacatgaccgaaaccatcgtctccgtcaagcaccccggtcacaggccccgtctctttaaaaacaggctgtgccccaggattgatccctcccgctaaaagcctgttcacatagtgttctgtgtgcagcacgccatgcgaatgtacattgcgcaaatcagcgtgcacgagaacatctgccactttttcagcatctcgttcattcaaaccggcaccgtccagcttttgccaaacgagttcctttgcttcttcagctgcaattgttatcgttttcaagcaagtgcctccttccttttcagttttttgggcactctccaagcgaaacccctacaaacacattttatttacaaattattttaaatattctttatattatattgtcagctcttttgatgaagatcctgaacgatctgagcatgctgctggtctgtgagtttataaagaaagccgataatgaacatcgctaatgccaaagcaatggccggatacagaagaagcagcgctttgatgccaatcagcgcctgtgctgtctggactgcattcggcacatagccgataatccccaaaccgatccccgagagaaagccagacaaagattgagcaagctttcttgagaaattgaaaagtgaatatgtcgttgcttccttccgttcaccggatttccattcgccatagtcgataatatcggagacaagagcccacgtgatgccatttgggatactgattccgataaaggcgatactggcgagaattgtaaacacataaacgttagatggaagcataaagttgatcagatccgcggccacactgatgccaaagccgatcattgccgttcgtttctttccaaacatcttgacgagctttggaaggaatacgacgcccaaaaaggaagaaccaataatgatgaagttcatataagccattaattcaacattgcccaagttatattgtgcgaaatagacgagcatggcggatttaatgttgtatgcggaaattgaaaaaatcgtcatcaggacaagggttaacagcggtttatttgtaataaatgttttgacgacagatgagagtgttaatttttctttgggtgcttccgatatgataatgcgctctttgcagttgcggtagcaaatataaaaccaaaacacaccgagcgcggcgaacaagcccatgaccaccgggtagccgaccttcggattatcaaacttgacgagcagcggcatcacggccacacttgtgataaacaaggcgccaagtgatccgatttggcggaacgtcgaaatggaggtccggtcctcagaattttgagtcatcgctgcccctaatgagccgtacggaatattcacaaacgaatagccgatgccccaaatcatataggatgcatatgcatatatcagttttccggtcgttgatacattgggagacagaaaaataagaacagtaagcaccgcaagcacgatgctgccgattaatagataaggcctgaatttcccccgtttgccgatgtttttgcgataatcgattgatgagccgacaattggatctgttatcgctgcaaacagcttactgactaaaaaaatgccgccggccatcgcagcggggattcccgctacatcagtgaaatacttcaataaataaatctggccgagatcaaacataaaaccgttgccaaaatcaccaaagccataggacattttctctttcaatgaaagccttttttccgtttcgaccgacacaaccttatttgccagttcagttcgcatgttccacctctgtgtcttaagaattttcggatagtgatccgctcagcgatactgagcggacactttgttacacgtttgctttctcttcttgaaattgaaagtagtgtttcgcattgtcatagcaaatcccctgaacgatgcttcccagaagctccatatcgcgcggcacttcgccgttttccacccattctccaatcaaattgcagacgatccgcctgaaatattcgtggcgcgtatacgaaagaaagcttctggaatcggtgagcatgccgataaaacggctgaaaaggccaacatttgataacgctttcatttggtcgagcattccgtctttagtatcgttaaaccaccaggctgtgccgaattgtatttttcccggggtaataccgtcctgaaaactgttgatcatgctggcgatgacatagttatcatttggattcagtgaatataaaatcgttttcggcagctggttcttcatctcaactgagttcagcagcttgtataaaggcttagcaatttcttcatcgttcattgaatcataccctgtatcaggtccgagccttttcatcatttttgtattcgtgtttcttaaagcgttgatatgaaactgcatcgcccaatcgagctccgcatacaaaccgcaaagaaactgaagcgtatatgtcttaaatttcttctcatcttcacaagaaacctctgttccttgtaatctgtcagaaaaaatccgtccagcttcttcttttgttgtttcggcaaataccattgtatctatcgcgtgatcagaaactctgccgccggctgagtggaagaatcgcactcgtttttccaacgcctttaaaaactcatcataggttgtaatcgatatggcagcggcatcttcaagcgcctgcacccactcaggaaagccttcacgattgatctcaagtcctttatccggccgaaatccaggcagcacactgacaggaaagtctttgtcttcttttaacaataaatggtattcaagagaatcaacagggtcatctgtggtgcacacgacctttacatttgatttcacgattaaatcccttgccccgaagccttcccctttgagcagtttatttgtctgtttccatatagccgacccggacttctcgtttaaaatctcgtaaatgccaaaaaaacgctgcaattctaagtgagtccagttgtagagcgggttgccaatcgccatcggcacggttttcgcccaagccataaatttctcctcatcaggcgcatctccggtaatgtatgtctcctcaattccattggctctcatgatgcgccatttataatggtcaccatacagccaggcttccgtgatgttttgaaatgtcttattttcatagatttctttcggacttaagtggcagtggtaatcaataattggcatgtctttcgcataattgtgatagaggctgacagcggtttcatttttcaataaaaagtttttgcccatgaagggttccatgtcctcaccgtctttcattctatttcaaaatgttaacgttaacattttgatttgtttttattttacctttatattcctttgggatcaatctcttttttgaaaatgaaatgttaacgctgtcataaacataaaaaaagacattgccagaaagcactcggaaaggaatgcttttggcaatgccagattcattaaaaggattagtaagccaggctgaaaagtcctttaatatgtgtcaaatatcgtacattacttgcttctttcatcaaggaagcaggaagacctttaagcggtgtagaattagcaccaatgatggcaaccgcgtctttgcgtccaaggcttgcaagtgtaccagagtttactggcttgaatgtttcaagcgttttgccttctaggtaagcgaataggttgtaaccgatcagctcacccatttgccatgcgatttgtgcagttggcgggtatggacggccgtctggaccgaagtaaactgcgctgtctccagcaacgaatacatcttcatgagatgtagattgcaggaagtcatttacagtcgcgcgtccgcggttcacttctaggcctgattcaccgactaatgggttaccttgtacgccgccagtccaaacaaatgtgttggcaacaactttagatccgtctttcagatcgattacgtttccttctacatttgtaacaggaagacctgttaagaactcaacgccgcgtttttcaaggcttgcagtcgcacgctcgataagatcatccggaagaacaggaaggatcttcggacctgcttcaacaagtttcaatttgatttctttatggtctacgccgtattttttcgcaaggttcggcatgatgtcagcaagctcaccaacaagctcaacacctgttaagccgcctccgccgataaggattgttgcatctgcttcgtttttcgttttagagtactcgcgcacacgatcttcaacatgttggaagactttgttcgcatcggcagcagatttcaataccatgctgttttcttcaagacctgggatgccgaagtaagccgttacagaaccaagacctacaacaagcgcatcgtaagttaatgtagaaccgtcagcaagcgcaacttcttttttatcaacagagaaagagcttacttccgcaattttaagatcaatgtctttgcctttgaaaagtttttctaatggcattgcaaccgctttttcagacacgttgcctgcagcaaggcggtgtaattccgtaatgatttggtgagttgggtatttgtttaccactgtcacgcgtgcttgttcttttgtgtaatgtttgcgaactgttagagcagaaagaactccgccataaccagcgcctagaatgacaatatgttttgacatcgtatatcctccgtcctttatatcaatttgaatctgagattatttttggttttcgcgttcgttcatgacttcaaggtagctgttagcaaaacggaacagcttttgagcttgaggatctttcagcatgcgaagaaggccgaaaagtccaattgtttcgttgcttgcttccgcgcggtcttttgcttcgatcgcagtcgcagctacttctttcgctgtttcttttacaggctcgagaatttcagtgatcgcaccgactgtgtcgctctttaacacttcgtcagtcgctacagactgagcgaaatcataagacttcgttaaaatattcactaactcagtcagcttcggaagctggtcaactaaaacagtcaatgattcttgaacttctggctttaatagctgatcaataagatcttgctggctttggctgacagacgcatttgtttgatcgattgtttctggcatatccaattctcctttactataagcagtttgctgatttttttggaaagggtagtgcctctccctgtctcacgcttttaaggcataagaataaggattgtgaattcatgcacaatcatttacaaaaataaatgtttactacccagtttttcatcttgccatattcagtattatttttatctaaaaataaacaattgaataagtcaaaatcctttactctctctgaaaatagcaaacacaaaaaactccaattcgattaccttctatatgataacactttttgaacaaaatttgaacgtgaattgcttcgattatgaaattaatttatatggagctcatgtcatatcgtttctgcggcactagttattgacaatccagcaatttctccccttcactttacccatatttccaatagaggctctctttttcctgtgatcggatcattcgccggcaacgccgcctgcttaatctgtttgaccgcttcctcccgctcattcggcttccccgtcttcatatcgtactgaacgccaccgggataggcgccaaggacagtaaaatcggggcttgagctgagctttttatgtccgactccggctggaatcacgactgcgtcgcctgatttgaaagggatggcagcccctttttctcccccaaactgaatcacagcctctctcctaagggcaatcaggacttcatgcgtattgctgtgataatgatggtatggaaaaacactccctgaccagctgtttgaccagccatgccgggtgacgatccgctctgccagtccggtgtccttaagcgcgttttgatacaccacgagcggaaaatcagggtgattcggaatcctgccgtcatccggaaagaagtatgtctgtgtctctctttccatcaatttcacctcccttttttgtcttccacatatagcggttcgccaaacatgatgtttttctcatgattccattgatctgcatgataccgaatagtatagtataaaaaaataatgccagaatgagggatatcatgaaagctatcgttatcggaatattggcttcactctttttcgccgttacctttatattaaacagagcgatggagttatcaggaggcagctggctttggagctcttcgctgcgctttatttttatggtgccatttttatgtttgattgtcatcatgagagggacattcacgcctctcttactagaaatgaggaaaaagccgttttattggatcaaatggagcttcgtcggtttcgtgcttttttacgcaccgattacatttgcggctgcatacggtccggggtggctcatagctggaacctggcaaattacaattgtagccggggtgctcttatctcctttgttttatgtcaaacaagatatgccgggcggtccgcagctcattcgccaaaagattcccctggtttcacttggcacttctgtgatcatcctgattggagcggctctgattcagcttcagcatgcagaatcgctttctgggaggatgctgcttttcagtgtgctgccggttgtcattgcggcttttgcctatccgttaggaaaccgaagaatgctcgaagaatacggaggccggcttgatacatttcagcgcgtgcttggaatgacattggcaagccttccattctggcttatattagcagcttacggctggtggtcagatggccttccaacagcaagtcaaaccgttcaatcctttatcgttgccgtcagctcaggcatcattgcgacggttttatttttctgggccactgatatggtaagagacaatccgcaaaaactcgcagctgttgaagccactcaatccggtgaagtgattttcgcgctgcttggtgaaattgttctgctgtcaggcgttttcccatctctattatcatttgccggtttgttcattataatagcggggatgatgttacataccttcgcttcacagccgagaaaaccgaaaaagaaagcacagtcaaatctgactgcgtagcatctgcaggagaatgggtgaaagcctgttctcctttatttgtgctaccaaaaggaatctgtttcacgttatagttaaatataatgtcagcctacttatattgaaaggtgattattgtaatggaagcaaacgatcaaacacaaaacataccagccatctccttcagatcagtcagaaaaagctataaacaagatggacaaacctatgatgtgctgcaggatgtcaccggagacattcaacagggtgcaatcgtagccgttttaggcccttccggctcaggcaaaagcaccctcctttctatgtgtaatttaatgagaacgcctgacagcggcgaagtcaacatatacggaaaggaagtcagagaatggaatgtcaatgagctgaggcgaacggcagccctcgcgtttcaatcggctcccgtgctcgacgggacagtgcgtgacaatttaagtcttgtacaaaggctgcatcaatcccagctgtactctcctgaaaagctggcttcgcttgcagggctgccgccagagttgttagacagaagcgccagagacttatcgggcgggcagcggcaaagactgtcactggccagaacgctctcaaatccttcctccattctattgttggacgaaatcacatcggccttggacccggtctctgctcttgagattgaagaactgatcaaacgtcagcatcaagagaaaaaatggacagtcatgtgggtcactcataatatggagcaggcaaaacgaatagccgataccatttggtttatggcagatggccggctgcttgaaatcgctgaaaccgacacatttttctccgctccgcagcatgaagcagcgaaagaatttttgaagggaggcactcggtaatggattacctttctctctctttaacgatgatctttgttttgatcgccttgtttttatcaaaatcctttaaagccggtgtagaaaaagacatgatcatcgccaccatccgggccgcggtgcagctgcttatcatcggttatgttttgtcgctgatttttcgcggagaccaccctgtttttatcctgctgatggtgctgttaatgctcgcggtggcggcgcaaaatgtcatcaagcgaaagaaaaatactatcggttcgttttggagggtgtttgccgcgttagcaatcgtagaaattgtgacgcagggaattctgctgtctcttcatatcattccgcttacggcacgatatgtcattccgatcagcgggatggtcatcggaaattcgatggtgctctcaagtttgtttctaaaccggcttaactcagaagtcggcgttcgcaaagaagaaattcaattaatattgtcacttggcggcacaccgaagcaatccatacagcgcattcttacctcagcgatgaaaatgagtatgatcccgacgctcgaaagccagaaaacactgggtcttgtccagcttcccggcatgatgactggccagattctagccggcgcggacccgattcaggcagtacgctttcaactcttaatcgtgtttacaacgatggcctcagccgcgctgacttgtgtaatcttaagcgtgctgacatacccatcattattcaccgttcatcagcagctgaagcaaaatgaatgacagacaaaagccgctttccgagggaaaagcggctttttgtacttgttattccttttcttcataatacttggccagctcaacaatcatcgcacccatccgctcaatctctggcgcaagcagtctcgtaatgccctcttcccgcagtgcttcagcagtcacttttccgacagcagctgcgatggcgcgttcttcgaataccttcttcacttcattgatataacctcgccccttggcaaaatcaaacagggaacgaacctgaatggccgttgtaaaacaaacggcatcgacctcatcgttcatcagctctcggcataaccgctccaccgtttcctcctccggcgggatgtgctgataaggcagaatcggcaggacagacgcgcctttttcttcaagaaatgccatgagagccggcgctttttcgccatgaagctgcaccatgactgtttttcctgaaaagtcgtgaggctccaaggaacggattaagcctcttgttgtcccgtcttcatccgaagcttccggtgtgattccaagctttttcagcgcagacagcgttttgtatccccggcatgccgctttcgcttggcgaatggcctgcagaaactcatctttcagtccaattttctctgccatatcgacaagagtctccaacccgatgcctgtcgtgaaaatgacccagtcagctttttcttccgcaaacgtccgcaaatccggctccacctgcttctctgctaagtaaactgtaccttggagaggccggatgacaggtattccgccctgtttttcaatgattgtactaatttcttccgtttttcgtgagccaccgattgccacgcgttttccaagtaacccttttcccatacccgtttcctctcctctttgcataggctttttatgtatataagcttaataaagctattttggcgcaaaccaagggagaaatcaagataaacccaacctcctaaaatccattgaatacgccggaagcttgctgtaagataaacagcagacacgtcttgtaacggaggatcgacatggaaaccaaaaaagaagaatatgaaacaaaaggctacgatacatcgattgtttacgaattcaatgaatatccggatgcccgcagcgggcgctgcgacaactgtgattacacactgttcaaaagctctgtaaaaggcggaaaatttcttagagaatgccggagatgcgggatgaaaaaaaatatttaaacagaaaaccgaaatcaaattgatttcggtttttatgtttttactgcgggacagcggattttttcataaacgcttcaatctcagctgccgcacgctccgctccgccagcttcttttacatccttttgcatattcttgacgcggctgagcagctcttgatcactggatacagcctgaaccgcttcctgcaggctggaaacagtcacttcctctttcggcaaataaacgccaaggcctaattcatcaacccgatttgcagtgagctcctgctcatacatttgcggaatgacgacaagcggcacacctgcgttcatcgcttccatcgtactgttcatcccgccatgagagatgaacaaatcagctttctctaacacctcaagctgcggcacactttggcgaatggtaaagttagcaggaatatcctccaagctttctggatcaatcgttttcccaaccgacatgatcacttgccatgaagaatcccgaaatgccttgatgcacatcttgtaaaattccggccatgcgttaaacgccgtacccaaagaaatcagcataagcgggcgatcatccttgtcaatcaacaggctttctttttccttccgttctccgagagaggggccgacaaaacagaaacggtcatcgaacgtctcatgctgaatctgaaaagacttcggcataaagacaatatttaatgcttccggcacagctaactgttcaaatgaaacagccggcaacttctcttgctccaagtaggctttaaattcagcctctgcttctcttatttttttcagcatgtcttcatttcctaactgaaaggattcattttgggcatatgacgaacagagcttaatgaccggaacattaagcttttcagcaaacaatttaccagccagcgcaacaaagtcatagatgatcagatcaggctgatcatccttatataactcctcaagctgcggcagaatgctgagtgattctttcaaaaggctgaggggcgcgtcattcttttccatcatctccctgatttgcttaggatcaatattcaaggatgtatgatagatcaatgcttctccaccggcttgctgaacagcgggcgcaaactcctcagtcgtcgcgtacgtgacacggtgccctttctcacaaagcttctctactaaagcaagcgtaggattgacatgtccgtacgccgggatattgatcatcgaaatatggtactttttcatgaatctccagtctccttatctattacattttcacacggaagctctttaatccgtatatcacactgttttcaatcggagtgatactgacgcactccatatgaggaaaagcagaaatcaaagacgttaacgcgatatttgcttcaagacgggcaagcggggccccaaggcaaaaatggatgccgtggccaaacgcaatatgcggattgggatggcggcggatatcaaacatgtgcggtctgtcaaactttgcttcatcacgatttgccgatgccacaaacgccaaaaccatatcaccttctttaatcaggtgccccccgatctccgtatcccgcttggcaatgcgcctcaaaaccggggccggcgctctgaaacgcaaggcttcctccactgcctgaggcatcagttcaggatggctgcgcagttcctcgtaaacgcctggcgtttctaatatgctgtacatcgcatttgaaatcaggtttgtagtggtttcatttccggccaccagcagcagcgtgcaaaacggaatcagctcttcaccggacagcttctcgcctgtttcttccgcttccactaaaatagaaataatatcctgttccggtttgtttcgcttttcttctatgatgccggcaaaaaacgcggccagttcttcctcacacttatctcgttcttccaaaaaggctttttcagcttcttcacttttatccttcggtgtactgaccagaagatcagaccatgctttaaactgttccatatgcgctgaaggcactcccagcagctcagatatcacaataaccggaagcgggtatgaaaaatcgtgaacaaggtcaaactcactgcgcccctgaaatttttgaatcagttcatctgtgatttcttgaattctcggttcccattgcttcatcacgcgcggagtaaaggctttgttcacgactgaacggatttttgtatgcttcggcgggtccatgttaatgatggaatttccaatagagcttgtctgctgcggcatgcaactggaaaacaactctttatccccaacaacttttttgacatcatcataaagaaaaacgctccacacttggttttcttcatcaaaggaaacaggcgcatcctttctcatcgattcataccatggaaacggatgatacgcatcctgtttgtttttcccattgagcagcgctcgctgcaaggcttgccggcggtttaacacattcatgtacggtcactccccttgaaagaattcagcaattaatgttccacttcacctcccgctttcgaaaaagagagggactaccacaaataattaaattgataacagcaggcaggcgatcacgatgttcgatgcaggcatcatatattccccctcgaatttcgttcatcttaccataatctttcaatttttttctattctgcactgctgttttggctcacaacgtgaccttaggcataagcacgcaaatccaatatggattcaattgcaccgctccgctcaaaaaacgtctctgttttcaaccaaatgcactaactccaaaaatgactttcccattatgtaaaataatttggttctatgattaaatagaaggtaaaaggtgaaggagagaacaacgtggcagcacagactgattacaaaaaacaagttgtcggaatcctactttcacttgcattcgtactctttgtgttctctttttctgagagacatgaaaaaccgcttgttgagggaaaaaaacaggaaaactggcatactgtcgtcgacaaagcctccgtcaaaatttatggcagccgattagttgaagaaaacaaattaaagcaaaaactcggccataaacaagccgattctattttgacccttctgaaactcgccaacgaaaaacacattacattataaaaaagaaagagcccacaggctctttcttttttagtcaaatatcgttttcttgtccggatggcgcaaaaagtcaaacagcatgctaagctgtgagggtgtgtttcgtttaggagaaagcggcgggagtctgtcttccggaaaaaaagcggcatgattcgtctcgatccctgtttccccctgcccgtccgtcatgctgcatgcgatgaagattttataatagtgataaggctgagggggatgagagtgtttatggctgtctagcacggccagcaatcgagacggctctgtatcgtaccccgactcttctttgatttccttgacaacgttttcagccggcgataaaccaatctcgcaaaatccgcccggcagcgaccacagctcatcatgcttctcccggacaagcaaaatctgattctctctgaatacagcgccgcgaacatccgctttcggtgttggatagcccttctcgccttgccataaatcagtgataacttcaatgtccttctccgagtaatccgccatcatttccgcgctaagcttcattagctcttcgtacctctccctgtcgtacacatccttggaaaaagcaagccccgcttgggcgatcgcccgaatccgctgtgcccgttccagccatttggtttgcacttttatcactcatcctttcaagtcaagtttcgctataaaaaatgcacgttttccacagatgaaaaacgtgcaactgtaaattagcatctaatctaacttcaccaagtaatcaatatcgtcctttactctctcttctgtattactgctatttgtatcagctaaaaacggattatataccagtgtgtaatgtttctgttctcctttagggatgacataactgagtacacctgtaacctttttccccgatactagtgttcctcccataaggattctgcccttctcttctatagaaaaaacaggccgcactgattgatcattcttatctcttaaatcaaacccgataaaattgtagcttattgaatcttcccctatattttccatcgtaacttctataataagccgttcctcatcatcttttattgtttttgtctcctcatttacagctccgccaacattcatatattcacctttttgcactctatcaactttattcactgtaaaattcgtatgtcctgctttaaatgtttctcctattttatgtatttgatcatcttttttggtcttcggctcaccgccttttttcaattccttatcaagttccttttcaagctcttcttgcgattttttctctttcggtttttccttctctgacgcatcgctcgattggctgcacgcagaaagcgctaacccgatcgtcaagacaaataatagtaataagacttttttcatgattgttcccccatctaaagtaatcgatttctattataatcagattttcccttttcttaacaggtaagaaagtaacgattatttctatctcattcatcacaatcttacttcttcctagtatttgaatattttttactagtccattagaccttttcatcaaaaaacccgagctggctgaagccgctcgggtgggaggtcaatctcgcttattcattcctcttttctctcggggttcctgatgatgtttttggtgttccggaggctgcgtcgtgcgttccagctcctttgtatcttgtcccattccttttaaaaaggaaaagagcagtgtaattgatttgttgatttccgggtcttttagcgagcggataatatcaaaataacctgtcttttcttcactgtttttctgctctacagcgcttgccacacccgcattcactttcaaaatgagaggctccagctgcttcacgtccagcatgccgagtgttccaaacagaagaagcagatttttcagcgtattggctgtttcctctgtatctgcctttttcaccaggatatcaagaactttatccccttgaccaaaaaggccgcggagcaacggcaggaccccgcgctcgttcatatggcccagcatatgcaatgtttcgagaatcgcttctttgtggtcaattagagcatcttcaatttcccgcaaatcacgctttcgctgatcctcttctgttacctcgattttttggattcgtttaatcgctttagccattatggcccatcccccttttcacagcgtcaccagggaaaatataatccttccgcgcccatttcttatgaacctgcacaccgatttgcggctgcggattgccgttgcggtggttgatcttaggcagcgggctgattccgtcgtgcttcaaaatttccatcttggccgatgtttctttgtaagcaggcgtatcggtatccttatcggcatggctgcctgttaacaggttgatcgccgcttcccctgaatcgttcattggcagatatacttccttccctttgactcgatcagtaatcaggcacttcactttgacatttccgaaaggcgatgtgagtctgacgagggttccgtcctgaatccctcgttctgccgcaagctcaggagaaatttctaagaacacttccggtgttttctccgaaatcccttttgatttgtaagtcaggttcccttcgtggaagtgctccaagagccgcccattgttgacatggatatcatattcctcaccgaattccttaggctctgtccactggacagggtagagaatggccttgccgtctgggaaagggaagcgctctgtaaagagtaaaggcgaatcctttccatcagcgtttacaggccattgcagggaattatagccctcaagacgttcataggtgacaccggcataaatcggcgacagcttggctgcttcctccataatgtctgcaggatgctcatagagccagccggcgccaagcttattggcaacctccataataatctgccaatccggctttgattcacccagcggttcaaatacctgatacaaacgctgaatccggcgttctgtgtttgtaaacgttccttctttttcaaggctcgggctcgcaggaagaaccacatcagcaaactccgctgtacgtgaaaggaaaatgtcctgcaccacaaagaaatcaagcttttcatatgcagcgtgtacatgattgatattggagtcgacaaggcccatttcttcaccttttacatacatcgctttcaactgtccggaatggattttttcaatcatttcgtggttggtcatacccggctccttcggcagcggcacaccccacacacgctcgtatttttggcggacttgttcgtccgtcactttttcatagcccggtagtctgtcaggcatactcccaaagtcacttgctccctgcacgttgttatggccgcgcaatgggtaagaacctgctcccggttttccgtagtttcctgtcacaagcagcagattagagatcgccgtgctcgtgtcgcttcctccaatatgctgtgtcacgcccatcgcccacaatgcgcacacactgtcagcttgcccgatcatctctgccatttggataagggtttcttgatcaatcccggttttctcctcagcatattcaagtgtgtacggcgcgaggctttttacatattcatcccgtccgttcactctttctctcaaaaatcgttcatcggccttgccgttttctattaaatatttggcgatcgcattcagccagacgatatccgatccggcacgcggctggacaaataaatctgagcgctctgccatttcgtgctttctgatatccgcgacgatcactttctgccctctcagcttatgagcccgtttaatccgagtggataagactggatgcgactcagacgtgttcgaaccgataatcaaaacaaggtccgcttgcgcgatatctgtaattgatcctgaatcaccgccatagccgactgtccggaacaggccggcagtcgcaggagattggcaatagcgagagcagttgtccacattatttgtgccaatgacccctctggccagcttttgcataagataggattcttcatttgtacatttagaagatgtaataaaagcgagagaatccgggccaaacgcctcttttaattcagtgaacttgctggcgatcagcaataacgcctcctcccactctgcttcacggaaatgatcgccttcacggatcagcggctttgtcaggcgttcttcgctgttaacgaaatcccagccgaacttgcctttcacacaagtagaaatgccgttggcaggcgcttcctcctgcggctctactttcagaatgtctctgccctttgtccagacatcaaagctgcagccgacgccgcaatacgtgcagacggttttcgtttttttgattcgttcatcacgcatggccgattccatatcagaaatcgcgagaatcgagccgtagcctgtctctacgcctttcgtgatctcgatcatcggtcgcagcgtttcgttattgatgcctgttaaatatccggcttccccttccattcctttttccatcatcgcgttgcacggacagaccgttgaacaatggccgcatgacacacatgacgactcattgatcggcacgtcgttatcccaaatgacgcgcgggcgtttccgctcccagtcaatggtcagcgtttcagttacctgaacgtcttggcatgcctcaacacagcgtccgcacaatatacattgatctggatcataccgataaaacggatgggattcatccttatggtatggcttgtgatcaaacggaatgctttggtgattgattttcatttccttcaccgtattatgtatttcgcatcccccattgttgtaatcgcaaactgtacaataaagctcatgattatataaaatcttgtccatcccgatgacctgcgcttttttcacgtcaggtgagagcgtatcaatgacatccccatcctttaattcagcggagcacgacctcttcagctcaccattgatgctgacgatgcacgtatcacatgtctcaatcggccctaagcttggatgatagcaaacttgcggcacttcaatcgagctgttattcaaaagctgcagcaccgtctgttcctcggacgcttccatttcaacgccgtttattgtgattgttttcttgccagccatctccattcccctttcttgctttatataccgaattacctatttcagttcccttacaacaactcaataaaacatacaaagcgcactcacatgtttcgttgcaaaaacacggggaaacggaatggtagatcaattaggagggattaacatgaaaaagacaatgtctgctataaccgcggcagcagcagtaacaagctgttttaccggctttggggctgcgtccttttcagcaccggcaaaggccgcagctcaaacaaacacactctcagaaaacacgaatcaatcagccgctgagcttgtcaaaaacctctataacaccgcctataaaggggaaatgcctcagcaggcgcaaggccttaccattaacaaaagcacaaaaggggatgtccacgctgcgtttggggaaccggaaagaccagtcgggggagacaatcgatttgatttatatcactggaatatgggacagccgggctacggattttcctatcataaagacatgacaatttcagaaatccgctactttggaaccggtgtggaacggcagctgaatttaggcggagttacgccggaagtgctgcagaagcaattaggaccagtaaatcgggtgttaaccgtcccgtttaccgatgaaatcgattatgtatatgatacaggccgctatgaactccattttgtaataggcacggatcagacagccgaccatgtaaacctaaaagcaaaataaacaccctacgcggctattcagccgcttttttagtggacaaataaaagctatattccttacaatacagggagatgaagcagagacggggtatcaattcgcaatgaagcgaaatcgttggatatatgcagttttcaccatactgatcattgggctggggcttggatccagagcattctccagtgttcttcctgataccctcaatacttatctgggagactcgttgtgggccgccatgatcttcacgggatgcggatttctatttcggaagctgaagacaatgataacgggcattatcagtctttctttctgttttgtcattgaattcagccagctctatcatgccgaatggatcgaccagattagagatacttctcttggcgggcttgtactagggtacggttttttatggagcgatatcgaagcatatacaatcggaattgccgcctgtgccgccatagaactgctggttttgggaatcaaaaagcgccgctgtatgtgacgcttttttcatgtagaaaacagaccgcattgagaaataatggtcttcgcatccaaacgtgtggcctcgcttatcgtgatatgatgttgattcataaatgactgaacggcatgatagccaactgcataacccgcaaaagccgataaacctgcaggcttaaagccttggtcgttagcaattggatcaccaaacatataacggctgacttccgaaaatcctttcacatccagcacctcattaatcacatcaatggaatattgcaagtcttcatgatcaaaacgagttacccaagggcccaatcgttccgtaccaaacagctctctggcgaatgattccgccaatccttcaatcacaagataatccccgacacttacagagccatgatgaaaatctatatacgaaaaccgcacattatgatgaaactcatgagcaataatggaaggaatccttggcaggttataactgttcggattaatccatacatgaataaagcccggtatcccgccaaacccgcagtagcctttttgcagctgaagcttatttggatcagcgatataaaggccgaatttgatctcctttgcattcacccgcagctgttcgcgctcagcaaaaaatatgcattgccgaagtgcagattcagctgtctctgaaacatgtgattctttcagtatttgtagtgctttctggccgctttcagcatcacggacatccaaatagcccagcattttcgcagccatgatcacatcatagccgtttggctccttcgctttcagcggaacttggatggcggtccacatcttttcaaacggcctcatcatcgtataccgaaatacatcttctcttttctgttcttccattgaaaacagcttttcgtattgctcaaaggtcttttccattactagattcatcctgattccctccttgtcaaaaacatacgatatgccgcagcgtaagggtcaacaagagaaattaagccatttttcactgtaaaatcatacaaacccgccgataggtaaggcataggaggtggaaccatggatattcctgctttatcggttgcgatgcatcaagcatcccttgcccagaatgtaaatattgctttaacgaaaaaaaggctggacaccgcccagcaaaatgccgatcaaaccttaaagatgattcaacatccaactctcggacaaaccattgatgtaaaagcataacctcataccagaggcggccaagaactccatcctcccggccgcctttattgttcacaaaaaagcatgcatgttttgattgttcctccatatgatttattgtttgccatattaaggaggtcataaattgaaaagactgtttatgaaggcttcattggtgttattcgcagtagtatttgtttttgccgtcaaaggtgcacccgccaaggcggaaacccatgcctacgatggaaaaagcccttattacaatgattgtgcgtccagcggctctacaaaaaaatcctcaaacttagtgaatgccagcaatcaagtcatcggagtagtcgagcttaaattcagcagtacatgtaaaacggcttgggcaaaaatcacgatgaataatacattgacgtctggctatgaagcaaatgcggagattacccggaacacagacggaaaaagatataattgtgattctgcaggcggcaatggaaaagcggtggccggccaaaagtcttgctatacaccgatggtatatgatttagatccaaggacttcttacgctttcggcaagtattcaggaccaaacttaaatgtttgggccaccacaggctcttattaaatagaaaaaaggctgtccgtacggacagccttttctaatttatttcgcttctctttgttttttaacctcttcaagctgagaaactgtcaccaattgatagccttgatcggtgagcttttttataatttcatcggccgcatcagcagaggtgcggtaaatatcgtgaatcaaaatggttcttccatctcccgcctgattcatgacacggtcaacaattgtttttttgttacggtctttccaatcttccgggtcaacatcccataacgcaacatccattttcatttgactccgcagttcatcattaatgccgccgtatgggggtcttacaagcgtcggacgatatccgcttattttttcaatgatgtcttgcgtatcattgatctgctttaacgcttctttcactgaaagccttgtgagaagcggatggctccatgaatggttcccaacctcatttccttctttcagcattcttattagcgtttccggataatattgaactctgctccccaaaacaaaaaacgtggcatgacccttatatttcttcaaggagtctagaatctgatttgttgtcgcaggattcgggccgtcgtcgaaagtaagcgcaatgactttttgatttggatcaactgtttcctctttgggtaaagaaatcacttcatgcttcggcttttgttctttgattttatttttattttttgctttatcaatatattgttctttcagaatgtctttcaaaagacttttcttaatggcaatcgattgctctccaagatagcctgctgcaacctgatatgtgtcaaagtaaagttcgatataatcctccttgatggcaaagcggctgaaattttcttttttcggagccgtcccttcctttaacagtgcatcgtccgcggcaatgtccttattctttttcagctcgtgataagcgattaacgaaagcttatgtaagtagtcagcgtcctctttgaaaatatcatcaatggaaagaaacgcttgtttactaaaatcatagttaaacgtttttttcacggtttgcccgtgtgccccgccgatgtatttatattcattaaatacaatcgccactgtctgtttggcataatggacaattttataatcaacatttaattcgttgcgttttgtcgtatgctcttggtcaacgtcctttgtttccttttgaaattgacgaacctctttttctgcgaatctttttaatgccgaatccattttttcatttttgaaaacaggatagtttaccgcgtaattaaaagttttcccgtcattcacaagcgttgcgatctcaacattcccatattgagaatcagttcttactttattcatgaccgtttcttttttcaatgaatgattatggaaaaagccgataaggcccaccacacatacaactgctattaatacatgaaaccatttgattctttttgccaacaacaaaaactccttctttcgtagccatttcgatttactcttcatcagttggaactgtatctatttagaaatgtttttgtaacattgtagtaacatttatttcacatttgtaatactatgagatttagaagttcatgtcaatcctttttaaggaatttcatcataaaaaaaaccgaatttcatgaatgtacatacacccaacttaagcatcaggaatatggtaaaaggaataaaaaaagctagggaggttttcctcttggattaccctttgaatgaacagtcatttgaacaaattaccccttatgatgaaagacagccttattattatccgcgtccgagaccgccattttatccgccttattattatccaagaccgtattatccgttctacccgttttatccgcgcccgccttattactacccgcgcccgcgaccgccttactacccttggtacggttacggcggaggttatggcggaggatatgggggaggttacggttactagtcgccacatatcaaaatgggggcagtccagctccccatttttttgttttaaaaatgacaatatcatgacaaatatgggaaataattgtgattctgtccccctcttgttacgataacaaaagcatgcagttttgggggaggcgtctatttttggagaatacaagagattctgcagccatatctgaaacaaaatacataaaagcttcgaaccgggtaaccatttacgattttatcaaacttgcaaagccgggcattatcatatcaaactcgatagcagccttcggcgggttttggatcgcgtttgcaagcgcagaaaaaacgttaaccggcttggcttttttgatgacaatggtaacagcaatgttgggaaccgcgtttgtgatggcttccggcactgtctataacaactattttgatcggcatatggacgcaaaaatggcacgaactcgcagcagggcctcggtcacagggaaaatgccgccagccatgatcttaacatatggctctgttttaggaatcgcaggtcttgccatgctttattccctcaatccattaacggcctttctcggactggccgcctttattttttatgcgatcatctatacggtatgggtgaaacgaacgtctgtgtggagcacatttgtcgggagcttcccaggagctgcgccgccattgatggggtattgtgccgtaaccggtgacttcagtatgacagcagtgctgttgtacacgattatgtttctgtggcagccgccgcatttttgggcgattgggataagacgcaaagaggaatatcgcgctgctggcgttccgctcttgccagtagtcaaaggcaatcatgtaacaaaaataaaaatgatgcaatatattgccgtcctggtgccggtcacgctattatttcctttctctctcggcaccggccatataagcccattttatttcttagccgccttggttctcggaggcatatggatcaaaaaaagcatcaaaggattcaaaacagacgatgacgtgaagtgggcaaaggatatgtttgtctactcgcttatttatttttgcttgctgttcttcatcatgatgatcgattcatttatgatgtttctgatcagatgatgcaaaaagagccacacattaatgtgactcttttttgtttggaaaaacagcatctaatagaaatgtcatggcaaaaaacacaaccatgcaaatcaaaaatcgtataatctcactcaaaatccagctatcagctatgcgcataccatcggtttctcggagtgttgcgcatattgaaaaaatcatgagtatgttttttagggtttctttgttcataaaataccatcgctttctcgataggatgacttaaaggcaatgaaataagtcatcaagatataaaatgtgtcgcatcgttgcatgttttgattgaaagaaatcattgtttttttgccagccaattgtaaagctcaggcaaacagatgaaaaccgtttctgtgaaaaagcagatctaatcgaatgcttctatactctctccacaaataaaaaatgctaagaaatacatttgtttctctaatctataaacccgcactctttttccatcatcaggtattataagccaaaaacaaacaaaaaaatagacttgcgtttgagttgtatggaagtgaaattgcaagaataacccatacggtggtaatatattgtttgattttcccatattcatagatttggaggtcatacaaaagtgaagggaatatttttagttgttcagcttggattttctattatggtatttctgtttttagctgctgttaattggtatcaaggaagcgagcttgtttcagatcgatttgattggaactatactgctaaactctcaaaactgcttaatggaattgatgccgtcagcagccccaaacaaatttcacagcttgattttttcatctactccgctaaacactaccctgttatgagtgcgttaatgatcatctccttcttatatgttctggccgctctttttttacttatatactcagtcaaatgcaataagcaagagattcatttggactgctgacccggtaaaattcgtttttatagccccttaactcttcccagatgcatgcaggcatcaggcataaatggatttgtttagtgagtgaaatatactttccgaccttaacctaggttttcggaacttctcgctccattttacgtataccttaataggagggatcaaacgatgaaagaatatgaattcgtaagagttgagctgagtacgatgagaagaaggcctaaagaagactaccagcaaatcatccatgattatgcgaaaagaggctggagattcgttcagattttcgctcccagtatagatgggtatggggcagctgcttattttgaaatcatatttgaaagggatgcggaaaaagcttaatcgatatgactaagctttttcgttcccctatatctgcatctatacaatttctgcaaatgcggcatcacatgatctggctaaatcttgtggcgccaactttagctgcataccgattttccctgcactgacaataataaaatcaagcgtttctgcagatgcatcaatataggtcgggaacaattttttcatgccaattggcgagcagccgccgcgaagatagccagttaccgctaacagctccttcattgcaatcatttctattttcttttcccctgtcacctttgctgccttttttacatctaactcttctgcaacgggtacaacaaagacataataatgatttgttcctgctgctgcaaccaacgttttatatacatatttcaaagaataaccgattttttccgcaacagagatgccatctaccggctggccgtctgttttataccctaatacctcataagagatgttctgctgttctatcagacgaaccgcatttgtttttgccatttttttcgccattgttttcacccactatcaaaatgatgtatgtctaacttcttgcagtaatatgtaaattctatcatcctaacctgcattttcaaggttactagcattgaatcaacggaaggacaaattgatttccttggacgcctatagcccattattagtctacatggaacaaaacaggaatgaacaaataactcccacatacaatttgtatgaatggaaaataaaggagtggttgctttgtatcattacttttatggccctgcgttaattccttacttttcacatactcataaccctcaaagaagtccagacttttcagaaagacagcgaagaagagaaatcacattgactgtagatggctttgtccccccatcttccaccgaagatcttggagacggcttttattcttacgcatggacgaaccaacaggtcatcaatccaggtgaatacttagtttgtcatcttgaaggaagagatatcaacgtgataaatggtgggttcactccgcgcgatactgctccattgtatgcggtagcaagctttccaagacgaagaaaccaatgggtcattatcattcataatcctgtgcaaacccaaagagccatatcgctttatttgattgcgaaaaggtagcacaacatgttatcagaaaccctgcattcaggaacagaaaaacgggtagggacacattaacatcagcattttcctacccgtttttggtctgggcaaactctcacctgtcactctttcaatccccctcaattttttcatctttctctactgccaaggtaccagagaaaattgttatatgttatcattattcccagtaaaaagaaaagaggattaaatatatggttctccttgaaacgaatcgattacgattacaaacgattgatattccccttcttgacgccgcgtctaaacaagatcatcaggctatcaaagaattaggctatgaaacaaatggtgaatggccaaattctgatttttttgaagcgataccttatttccgcgagattttagtcaaaaacaatggaacaaaaggatttgattcatggattattgtaaagaaggacaattatgaaattgttgggggaactggatttttaggtgacccagacgaaaatggcatgattgaaatcggttttgcaacaaataaaagtcatcgccgcaaaggttattgtgtggaagccgcccaaaaactaataaactgggcattaagccgagaaacagtatcccggatcaccgcaagatgcgaacatgataatctaggctcacaaaaaaccttggagaagttagggtttatattgaatcataaatcagcggagtataaacattggatatatgttacaaagtagagtccttaattacaaaagcaggcactgcgcctgcttttgtttggattatttacctctgtgcttctttttcgctttttgctttttgagcatatacctttgctcttttacatgttctcgttgttctttcattatttgttttttcttttgctttcttgcttcaagctctagctttatcgcctcttgagctttagaagttactccggcgtttttcaactcttttgaaacctggcgctgcaatctttttggattgatctttttttgacgcctgccttgtaaacgcactccttcctgctcagcttgggccatcatattcaaaagttggttatgaacaaactctaatacttcagaatccctcggctctttgccaaaaagatgacgaaaggctcttagctttccattgtccacaacttcaacaacgcctacccaaaactgaccatcgtagtaaatcgttaatttcataacgattccctcctcataaaagatattaaagaatgatggacatcccgaggaggggaaggttactgacattctcaatcatgcatccggactaccaaccgaatcgtgttttttcattctttaccatatacagaaaagagtgtaacatttcttctccaactattaaactcttattttatttagatcattgctggagaataggcgtcttcactcgcaaatttatttctcaagccctgccatgttacagatgggagacgatacattctgcatatccttcgagtttaaattctccaagaccgtaaggcagcaacatatgatctccttttttgaaaggatagacatactcaccagagatcatacggccctccccttcaatcacactgataagaaggaatggtttttgctgctttaagcttgctgatcctgataagttccatttccccaccgaaaagtaagcgcattcaatcaatgtcgttgtaagcaaatcctcaatttgttcatggtgaactgtatgccgttctggaatagacgggacctctatcacttcaatgctctttttcagatgaagctcgcgcagcttgccttctgcatcttttcggtcataatcatataatctgtaggttgtgtctgagttctgctgcgtctccaaagcaagaattccttttccaatcgcatgaacagtaccgcttggcacatagaaaaaatcccccggctttacctttacacggcgcaagagctcatcccattctccacgctctatcatggtagttagttcttcctttgttgttgcattgtggccataaataatctcggcatctttttggcaatcaataatgtaccagcattctgtttttccaagctcaccgttttcatgtatgttggcatattcatcattcggatgcacctgaacagataagtcctggtcagcatctaatatttttgtaagcagagggaaacggtccccttcaagctgtccgaataaatgtctgtgatgttcccataattcgctgagcgtgaaccccttatacattccgttttgaacaacgctttgaccattttgatgcgcggcaaaagcccagcactcccctgttcgttgtgacggaatggtatagccaaaatcagctaaagcggtcccgccccaaattctttctttgaaaacaggcttgaaaaataacggttcagtcgtcatgaaaatcccccgctttattcgatttcttctagcagcttgtatgcttcttctgttgtttgcacggagagcagccgctccctataattgtcatccattagctttcgagatagcatctgcagtattttgagatgctggtttcccccgctctctttcggtacagcaatcataaagattaatttagcttctgatccatccaggctattccaatcaacgcctgatcgtttgatcccaaaggcaacactcggctccctgaccgcctcagactttccgtgcggaatcgcgatattcatgccaatcgccgttgttccctgttgttcacgattcaaaatggcttgtttaaacccgctctctgaaagcagcgcacctcttcgtgacaatttctgaatcaattcatctatgatgtcatcactcgtttcccccgataaatttggttcaattaattccgggctgataatgtctgtcagttttttaaattccgacatctcagctttttggctttgaattggctgctttatttcatttgctgccgcagcttcacttggcgcggaggtcggtgcagtttcactgagcacaggagacgccgtaatatccttttttagtacattgacgaacagagcagtgacaagagatcctgcaatcacagcaataaaaaacatcaagacatgatcaactgcgccaagcactgcaacgataggtccgccgtgcgccactctgtctcccacattgccaatcatggctatcacagaacctgtcattgagcctgccataatacttggaataacgcgcagagggtcctgcgccgcaaatggaatcgctccttcagtaatgccgaagagccccatcgtaaatgccgctttccccatttctctttgagatgcctcgaattttctttttcctaaaaacgtcgcaatgccaaggccaatcggggggatacaaatggcgacagcaattggtcccataatttcataatttccttctccaatcattgccgatccaaacagaaacgccaccttatttacgggaccgcccatatcaaatgagatcatcgcccctaaaatcaatgccagaaggatcgagctcgaccctttcatccccgccagccaaactgttaaagaggcgaaaatttgagctacaggcgcgccgatcaaaaacacaaacgctaaacctacaatcagtgatgcaaacaccggaataataataatcggcataatcggctggatggcttttggaacttttaattttttgatccaaagtgccgcgtatccggccaaaaacccggcaataatccccccgaggaatccggcgccgcttgcgctgtcataaaaacttccagtcgccgcaatataaccgccgatcatacctggcacaagccccggtttatcagcgatgctataggcgatatagccggctaaaatcggaatcataaatgaaaatgaagcactgccgatctgttcaatcgttttccagaaggaatcatccggaataactaagcctttaggtgttttctcccctccaagcgttaatgcaaccgctatcaataatccgccgacaacaatgaaaggaaccataaatgaaacgccgttcattaaatgacggtaaattggattttgtttcttctcctgatgattaccggattccgattttgtagcggaacgatagaccggtatatccccgttaagagctttttgaatcaattcttccggtttgcggataccgtcctgtacccccacagacagcagttttttgcctataaaccggtctttgtttaccgaacggtctgcagcaataatgattgcgtccgcttcgcgaatttcctcttcggttagcttattttcaacaccaatccctccctgggtctcaactttgatgctaacgcccagtctgtcagcagctttttgcagattttctgctgccatatacgtatgggcgattccattcggacaagatgtaatcgctaacagtttcataggaaacctcctttaaagtgtgaataataagatcttgtctcaactgtataccgaaatcagctcattaaaatcgctttttttaccataggttccggtaataaaggcatttttccctataacaaaaaaagcaaggaataatccctgcttttaataatccaaatgagataaaaatgtcatgacattggtttctttcgtcagcttctggacgaaggccggctgctcgctaagatatgaaagctcgctaaacagctgctttgtcatagtttgatcctcgtgtttgacagccagcataaaaacgagcgaaactttttcatttccccattcaagcggctcctttaatgtggcaatcgcgattgctgattgtttaataaatttagcgtttgcatgaggaatggcaatgcctgacccaatatttgtagccgacattttttccctcatcaccgcatgaaccgcatagtccttatcaacatagcctttctcaaacaaagctgtcgccagctgttcgattaacttgtagcgatgctccgcctcctgctgcaaaaaaaccaaaaaaggagtcgtattgttcagcatctgaaacgttttttgtttttggcggtgtgattcgcccagctgacgtataaacgcacttaatttcttctcttcgccaggctctaaaagcggagacacaacaatatggggaaccgttatattctccagcgcaatggtggatatgacaagatcaatatcctcatgctttttgatataatcctttaaatcggcctttgcaatacaagccattacagcgatttggtgatatttccgttcaatttttgtccgcagcaattgtgacatcccaatccccatgtggcagacgataaccgcctttttatgtgtctcgctgctgccctgcatccgttcgatcgctgcctgaaaatgcaatgtcaaatatgctgcctcttcctcaggaatatgaagatcaaaagtttgattgatgtcttccaaaacatcaatgatgaggtggaacaaataagggtacatctttttgatgtcattgagcataggatttgctacagaaagatcgtagctcagccgttgtagcacagtattgagatgaatgttcaaaccattgatcaaatcctgatccttgtgaaaatccatcattttcagctctgaaacacgattgattaaatgccctacaaccttaggaagcacagcattttcaaggttctcttctgtctgcaatggataacgaaccttaccgcccaatatatgtaatgttaagtacacggcttcttcttcagggaagcgaattgcaaaaaccggttcaagccgctgtaaacaagcaaatgtccattgatattctttcttcttttttactgccgccatttcttttggggacaatgaaatcggctgcttcattttgatgcggcggaccattaacaatgtatgcagcaacaaactttcaaacgtttcgtctgtgaaatagagggaatgctttttttgtagtgatttgatttctttcgtcacaaagtctacttcataatgtaaaaacttacttttaataaattggctggtaaacgctgtattgtgaatcaaatcagatattcttgccaatgcctttcttttatttctttcgttcccttcaacctttaatccaagccgctgcctagaaaccagtgtgagatcaaaacgcttcagccactcttctactgcgtataaatcctttttaatggaagatcgattgacaaaatgccgagcggcaatgtcttttgcggaaacaggcttcggattcattaataagtcataagcaatgtgcagcattctttccttatcgctccgctgcctagaagaaaaatgttcagtatgtaattgttggcttagccaggtcctttcctgttcttctatatgtaaataaacgcccaaccctggttttcgaataagctgtgcatgagaatgctcattgagataatcctcgatcactttcaaatcattccggattgttttttcagaacactgtaccctatctgcgaaatcttgcacaactaaatagtcatcaggttcagataacaacagatacaaaatctctttttgtcttgtatttatgtattccatctgtttttctatccttcctgtcagtatctacttgagcaaattgatagtataagtatactatataagaaaccgtttacattataaaacaaaatcatagagacaaaagtttcgttttttaccgaagcttccggaaaaaagcgatttttatactctttgagtttgctatgtaatgtatattcagcagaaattcataaaaatactccaattcttcacctatttagaacgaagattttctaatgtatgagtacgaaagtaagaacatgatgaagaaaagtgatttggtatcttcggggataaagtgcaggtaacaaaatttccacacgctcaacaaactaatacccatcaaatgtgtgctattaacattttaaggatggccattctctctcagcaattttccatcataaatacaaactctgtgcagggcacacaatattcttagctcaaatcaattgatcgttcacatattattaacatttatttacaaggaaaataattacttttattgaattgttatagtgcaagacaaaaaactttaaaggagtgtttcaaaatgaatttcaaaaaaacggttgtttctgctttatcgatttctgcgttagctctgtcggtcagcggggtagcttcagctcatgaaataaactccacacctactgaagtaaagaacatttctatttcacctacacatgttatcaagattcaagactataatttacctctaaaagttggagaaacctattctgttaaaaataattcagctactcgttattggactgataaccaaaaagttgctgaagtcgatcaaaatggtttagtgacggctaaatcaaaagggaaagccacgattactttgtttaaaggtactgcagtattcggaaaagtatatgtaacggtttattaatctttatccgccagattttctggatgcaaaacatgcatgaataaaataaggtccccctctaaaaagagaagggaccttattttcgcttcaagtttagatttagttttgggaatacatcatacattggtgtataccgtgtttcattagcttagccccgaataaatccaccttctgaatgaataatttgtccagttatccattcagcctcatcacttgcaagaaaggcaatcattcgtgctgcatcatctggtgtgccaatacgccccattggaaatttaggtgaaagaaaatttcttatttcatctgtcatccatgtagaatctgttggacctgggtttacggcgttaacagtgatgcccaatggtgcaagttcttgtgataacgacctagtaaatgcagaaatagctcctttagttgctgcatacgctaactccccaggcaaaggacctaaatcctgccctgatgtcatattgatgattcttcctgatattaaattagattttttaaaccgacgggcgaattcaacacaaagaagaaaattcgatctcatattaaccgcataatgctcatcaagtgatttagcatctaacgatacataattatcacttgcggaatgagctgcattattaataaggatggaaggatatcctaatttatctgaaattttttcatgtattgtgaatgcagcatgtgcatctgataaatcaattttcattgcctcacagcggacacccatacgtaaaatttcttgttgaaattcttctatccaggccgtatcagaattccagtgagtaaagaagatatgtataccctgtgaggctaacttacgacaaatagccgtaccaatatccccttgactgcttgctcctgtaattagtgcaattttttcttgagaatgactcattattttaacctccaatttataaggagtatctccattatgatggtaacaagctatccaaataatataatccattaaatcaaacagagctgactttgaatacattttaaaatcagcttaaaaaaacattttcgtctcaaaaaatattaaatagaaaaaataagagttggacaacaatttactacttagtcacaagtggctgatactaagtcattgaatgtctctttttaaagagcctttcaatcattcacattgcttttcattaaccattctacttccgttaattcttgtttttgaacgtctattgtgtgtttttttgtgaaatggattttcacagcttcttcgttttcccaaatctcccaaagcattattttacgttctgatggctcaagcggataagcatggaatgtaatacaaccctcttctttgttcgtttcttcctcaagttttttgaattccttcattatctcattaaggtctttatcactgatgatttttaaacatgccgttatgtaatgcatcgaaattccccctcccatcattttatggcttttcattataacattttcttgaaaaataaatataactgcgacattgattgctcgagttaatcaatcgctgtatgtaaaggatttaaaaattgaaatcaaataaaaaaccttcattttataggaaggtttagaagttatattatcaagtttgaaggcaatctgaagcaatgtgaaatgtgttaggtgtttgtttcactgtaaagtctgtagcgaaaccacgtactaaaactaatgacaagcccatcttcaatttcgctgacctcagatatgagggaccttttctttttcagctctttgatcatttcttccttatcagaaacgaacatgatcttttgcgcccgaagaatggccgcatattgaatctgtatctgatcccatatcatatcagctggcgaacgctcctgaatctcttccatgatttcaagcgtctcttctggcaagaatttagagaaaaagccgtgagtcacagcattttgattcttctgtggtgcgccgccattgttccctaatgcatttttgttgcccggttgcccgcctttttttgtgtgcacacttttttcaatgggtgcaccctttttcctttcccaaccatgccgctgcttccacgatttaatggtgttcactgacaccccgtatttctcggcaaggtccttgtatttcatgcctttgacgtaatccttatacgcctgaatgtgcttttcggccatctacattcaccgccgcccccttctgattcgtgttgttttggaaaagatattccctctaaaccaccaccgtgctcaagccgttaaccgccaattgtctatcctgagacttaccggaagcagtttacagggaacaaaaaaagcaccccgcaggatgctcttattatttaatccaatctttaatctctttaatggtcttataggccttagaccatgttccattctctttcaagtagttttcacctttctctgtcagttcaggtcctaatttgtataaatgaggtctatcatctgaataatggaccccaatgatatacccttcgcgttttaaaaagttcacagcatcatcaaattgatcttcagtaactccaatatcgttttctgacaaaggggtattaccttcaaaaatttcttttaagattgcataccttaatttatccttattcatattttctcctttcagtctttagatctgtctttcacttttctctctttgacttgttcaaatattttcataatagaaattgcttgatttctatgttttctttctactgcaattatccaaacaatagcagcaattgtaccagcagcaaaagataaagctccccaatgtttttcataaaaattaaagaacatggtgagatatgctgcaaataaagggataaaggctggaacatattttgaatgatcatggataatatctatatgagaaaatctcgatatagcaaattctaaacattcaatatccaacttataaagaagagattggaaccttttgtattcttccttatcatgaccaattcgagttttttcaagaaagaaagcaagtagctcctttttgtgataagtataaatcgcattttccagttcttctaagtcctcattattcttctcttcaatatttcgcttttcaatatttcgcttttcaatattcttctttttattatttttctgttttttcattttacaattcactcccatttttaatatcgggaatgaaaagttatcgattaacaatttgcaaaatttgtcgaacgaatctgttgaaaaaaacatattttgtcggggatattaacatgtacgcaatactgctgctgttttatcaccgattcactatgtaagacctcccagttgagttgatcctcgcttaccactgggaggttttactcattgtatgaaattggtggtgacgcaggaataatccgccgcgccgatcctgccccccattttacaccgccgatttaaacgaattcaaatattgcagaaagttggcttctttgactttattgacgatgttgccgattatggctgttttgatctttctgatggtatcccgggagcaatcaaggtggtttgcaatagcagtgtagctcatgccttccatcatgcaatcgtaaacgattcggtgcttttcttcttcaatgtgttccattgcattgtccaggtaatgcacaatagattcatatttgtgaagccgcctttctcttcggtccatctgccgcaattctgcctgactgacgcctgctgatccccttggcatgcccgcttcctccccgtatgttgcagtgagctttgtgctaataaaatccactttgtttaatacacggttgagccttttgatctcccgcagcatgaatttataatcacgaatccattcctcaatctcccatgcaatcatttgatctgtcatagtgctttccctcctgatagttaaatagagtaagtgtcattccagttgtttgctttttgttctgcgatatattgagggcctcgatacctctttcacgttgatactgaaggttttgaccaagaaggctttcaactcgttatagagctcttctttgccgcaaaagatattcacaagctttccgtttttataagcgaatccgtttttcatcatcctcaaactccctttttactttctgcgtttataagcgccgcctttgccacgtctgagtgtttgcatgttagtgttcatcatttgttgccagaaacgatctaagcgctcatgttgcttctgtgatggtttctttttggactgtttcatgtctaattactcctttcatagctagtaatcgcgatagacatctggttagttgcgaaaaaaaacggacaccgatcgaagcacaaatttctctgtaaaacgatcagtgtccgcaggctttccgtcttggacttattcaattttaaaatttatttttacggccctgtgccacaacttacttcgtattcaccatctgatgattttttcgaatagcataagtgaggagtttgccctgtttcatctttccaatctagccaatttacataataaagattcccagattcattgtctccttctcttttctggagaactgcaaagtagctttggtagggatatcctcttttataaatttcgtgtctgattgctcctttttccgaagaagctgtaaagacaacaggagatagaactggaagtactatcaatataacaataagtgctgccaagagagaaagtataattttagttttctttttcattttttcctccgatacctttttatgtatttatttttatgttatattattacatgtattttatgccatatttcaattggtgtaaatgataaatattacttatatttagattttattggaggtttcgtatgaaaaaagaattacttgcttcactagttttatgtctatcattgtcaccattagtgtcaacaaatgaagtttttgcagccactactaataaagagactaaagaaaatgtttcaattaccaacgagattggttacgaaaaagttaaggatatgttagaacaacaaaaatatgattttgaacacaacactcctttagcgcatcctaaagagtctaaattgactgattccgacgaaggagtcttactgtattctgcgttaagtaaagtggacaaacaaaaattccacgagtttacatacgatatagacgatgttaagacttctgaaaaaaacaataagctaattgttgaagcttatattactcgaaactttgtttttggtgttgaaaaagtaacaacatctctgggcgataatattaaacttgaaattcccaaaacaacttctaataaacaaagttctcaatcaacaaatacttctaatctaagtttctctcaagttaaaaattcttctaatcaactaaatgtaataccattgagtaattcttctaagcaactaaatgtaacacaattaaataattcttcttcaactctacaatatgaaaatgatgaagaatattcttcggatgttaaattagatgaatttttaaaaaattataagcaagaagtgaaaaatgatgataaagaagaagtgaaaagtgaagataaaccagtaagtatgaacttcaatgctgctaactctaatcaactaactgtgactgcaacatctgttaaaggatatagtggttacgctgcaatgaaatatgcagaaaaatatgccttaaaaccaaataaaaactataaatattataaagacaaagattgtactaactttgtttcccaagcattaagagctggaagaatgccgtactttaaagaatggaaaccctatacagatgcttgggttaatgcaggagcctttagatcatacattttaaaagctggcggaataaaaatgaagactgtttctgatacatattcaaatgtaaagcttggagatgtatatcactatgattaccataataaaataggtcttcgctatgctgatggttggatggatcatacggctatcgtaacgagccgagcaaatatgaaactttatgtaagttatcattctaccaatagacttaatgttcctcgagaatatgttacttctaaggaaggcggaaaacggtatgtttctagtattcgcaattaataaattgatactaaatcgttgatcatgccttccgctacttaataagctgttgggaaagcaatcccctgatctagagtggttcaggggatttttgtaatttaaacgtgttccaacgctcagaaattccgttcatttgttttccctcttctctcaatacatcaatatctttaaagtaaaccgcagccgtaaatgaaatgattgccccgatcaaagcaaggttcgctttcatgtccggcctgtaatcgtgttggaaatatatccagaatcaacatcccatcagcagaaacaatattctaagtgccatccaatccccctaactcaacttactaacaaaaaaacaccttggatgtttttgtattccatttaataataaagttgtattttaaaaaaagaagtgcttaaaatgaaattgaaaaagctttaactggttttgcattatcccttgctttactcgttactgttgctcctgcttttgctacaagccttgcaaaccatagcacaaatcacgaatcagtatcaccccaagcaatttatcaagattattataaaggggctgattctagagcagaatttaaaaatacaattgatgttttcagtacaaaatttcatttaaaagatgcatggctgaagtgacggtcttggactggctattctcaatgaagatttaacagaaatccgatcttccgtttgttactattgaactaatcaagtaagtttggaggtagtttttggactgcggtcaatgaatttcgccaacagttcgccaacaactcacgaatttgacgaaccggctttattaacgcaaagtaaaaaacccttgctgcgcaagggtttaagctatgattccgactgggctcgaaccagcgacctctaccctgtcaaggtagcgctctcccagctgagctacggaatcatgatatgtatgtgttgctgggtatgttgttatctttctgacaagttctattatataaccttaccttctattcgtcaactgcttttttagaaaaactttttttggacttgctgttccgttccccggctattataatatgtcttaattttctaacaatagaggtgatggggttttgcattctttgatttcttctgatgatgtatgggtattatgggggtttattgcggtgtgggcggcagtgagcatcgggctggagcagcgctttaagtgggcgtctgctgtgtcgggcgctattatcgcccttgcaggtgctatggtgtttacaaatgtaggagtgcttcctgttgagtcgcccgtgtatgacactgtgtggtcttatgtggtaccgctggcgataccacttttattgtttcagatcaatgttaggcaaatttttaaggaaagcaggcgtttgctgtttatttttctgattagctccgttggaacagtgcttggcagtatcctggctttttttctactcaaacagcatattccttacttagataaaatcggtgggatgatcagcgcctcttatatcggcggcggggtcaactttgcggcgatggcggcaaaatttgagacgcctggtgaatatgtgtcggctaccgttgtggctgataattttatgatggcgcttttgttttttattttaatcagcattcctgcactcaaatggtttcagcggcattatgccatgccgtttgaagagaaggtaaaagccgatggaaacagcggaaacagtgctgaaagctattggaaacggaaggatatttccttaaaggatatcgcttttaatgccggtgccgctttcgcgcttgttgcggttagtatgaaggtttccggttattttaaaagcattttttctcatcccctgctgaccggtacgcttggcgatcagtacctggttcttacgtctttaactgttcttatcatttttcttttcccgcgtttttttgaaaggctcaatggatctcaggagcttggaacctttttgatttatttgttttttgtggtgatcggcattcctgcagatctccgcttaatcgtcacgaatgcgcctcttattctattattcgtgtttatcattgcgattagcaatttagcggtttccttagctgccggaaaattgttccgtgtgcggcttgaagaaattctgctcgccgtcaacgctactgtcgggggaccgacgactgcggctgcgatggcaattgccaagggatggcgggagcttgtcgccccgatcatgcttgtcggtacgctcggctacttaatcggcaactatgttggcacttttatgggaaattggttttcttccttcttataaaaaggatatttgcatttccctgagaataatgtaagaggaatgctgacatgagaacggagagatcactatatgttaaaaggaaaaaccatttatgttagacctttagaagtaacggatgccgaagaaaatctggggctgcaaagcgaaaatcgagattttttcgaacagttttctatgatacgcgcagacgattactatacggttgaggggcaaagaaaacgaataaccgagtatcaggaaagacttgagaaagatgaagaatatcattttggcatctttacagcgtcagacgatagattaatcgggacggtttcgctctttcaaatcatccgtggcgcgctgcaaactgcgttcatcgggtattttttagacaaagcccataatggaaagggcattatgacagaggcagtcagattggttgttgattatgcgttccacgaattgaaactgcatcggattgaagccggtgtgatgccccgtaatctcgggtccatgcgtgttttagaaaaagcgggatttcataaagaaggcatcgcccgaaaaaatgtaaaaattaatggcgtttgggaggatcatcaagtcctcgcgattctgaatcctgatgacgaacaataataaaagaagccggactatccccggcttcttttttaacgaaccgaaactggagcaatttctttcagcgcttgttcgaaatcgtgttctaaatcgtctgcatgttcgacgccgacactcagacggagcaggccatcagtgataccgcgtttttcacgctcttccttaggcattgccgcatgagacatcgttgccggataggacaaaatcgattccacggcgccaaggctgacagcgaagactgggagtgacacattctcgactaacttcttaacggcctctttgctttcaagctcaaaagatagcacggcgcccgctcccgttgactggcttttatgggtttcagcgccgggatgatcagccagtcccggataatacacgcgcttgaccgccgggtgcttctggaaaaattccgcaagccgctgagctgtttgactcgctttctctaaacggacctgcaatgtttttaatccgcgcaggacaagccagcaatcttgcacgccaaggacggcgccgaacgcgttttgtagcttatacagctgcttcccaagctcttcatctttgacagcagccaaacctgagagcacatcgctgtgtccgcttaagaattttgtcgcgctgtgaagtacaatatccacgccgagatcaagcggacgctgcagtgccggcgtcatgaatgtattgtccagaaaggtcaggcagccgttttcttttgcaagctgaacaactgctttaatatccgtaatcccaagtgtcggatttgatggcgtctccatataaatgacctttgtgttcggcttgatgctccgcgccacttcattacgatccgtcatgtcgacaaacgtatgctcaatgccaaaccgggtcagcacctctgtcaccatacggaaggttccgccgtatacatcttctgtcacaagaacgtgatcaccctgtgacagcagtaaaaatgctgttgagatggcagccatgcctgaactgaaagcaaatcctcttgttccgccttccagtgcggcaattgtttcttcgagagctgttcttgtcggcgtgccagagcggctgtaatcatatgccccgaactcttcaaatgaagattggtgaaaagtcgaggcgtgctgaatcggtacactgactgccccggttccgccgtctgttttaaatggattgtgcacgagctgggtttccagcgtccaattgtgtttactcaaatgaaacagctccctctttgacctgacataatgcctgttttagatcctcttttaaatcttccgcatgttcaataccgacagaaaagcgcagcaaccgattgcacaccccgtttgcgatgcggatctcttcaggaatatccatgtgcgtctgggtcgcagggtatgtaataaagctttccaccccgccgaggctttctgcaaaacaaatggtcttcagtgcttttaaaaacggattgacccattcttctttttgcagacggaaggacagcatgccgccttttccgggatacagcacatccgaaatttcttcctgctcttctaaaaacgccgcaagctcctgcgcgtttgcctgatgctggcgcattctgaggctcagcgtcttcattcctctcatcagaagccacgaatcaaatggcggcaggacggcgccgattgcattttgatgctgaaacatttcctctccgagccgctcatccttcaccacgacaagtccagcaagcagatcgttatgcccgcctaaatacttggttgcgctgtgaatgacaatgtcagctcccagctcaagcggccgctgcaagaccggtgtataaaatgtattatctacgatcagcagaagaccgtgctcctttgtaatccgggcaatatgttcaatgtccgcctcctgcatgagggggtttgtcggcgtttccacaaacaccgcttttgtattcggcgtaatcttagagcgtaaacagtcctcatcgctgaaatcatcataatgaaaagtcaatccgtattttttccattcattttcaaataaacggtacgtgccgccatataggtccgatgaaacgatcagttcatctccgcttttaaacagcgccataatcgtttggatagcagccattcccgaactaaaggcaagccctctcgcgccgttttctaagttagcgatcgcgtcctcaacaagctggcgtgtcggattttttgtgcggacataatcaaatccggtagattctccgatccctctgtggcggtatgctgttgataaatagataggagcactcactgttcccgtgacttcatcgctacggttcccaatttgagctaatttcgtttcaacgtgctgtgacatatagctgacaccttcccttttcaaaataaaaaccccttcttcataagaagaaggggtttaacgcttcttcttatcttccaagcataaaaaacgcttgctggatttagcaccttggcgctttgcaaatgcaaaacaagccggttgctgaggtttctaagggccagtccctccacctctcacgataagaaatatcgatttcaattttctgattgttttatattagcgcaattcacagtttatttcaacacttttttcttcgtgtgccgaaccgtttaaagagagaaatttctaataattcatggtacaataattgaaaatgcaagaaagtatagtgatgtcctggaggaatgtttttatggcaccgaaaaacggcacagtgcaagaaaagaaattcttttcaaaagagcttaacgaggaaatgaccttgcttgtttatctgccgtccaactactccccgctttataaataccatgtcattatcgcgcaggacggccacgattatttcaggctggggagaatcggcagacaggttgaggaattgctgtcgaaacgcgaaatagaccggagcattattatcggtgttccctataaggatgtaaaagagcgcagaaacacttatcatccggagggttcaaaattttcggcttataaacggttcatcgcccatgagctcgttccttttgcagatgatgagtatccaacctatcagatcggttacggccgaacgctgatcggtgattcgctcggagcaaccgtgtcacttatgacagcgcttgattatccgaatatgtttggcaacatcatcatgcagtctccctatgttgacaaacacgtactagaagccgtaaaacagtcagacgatatcaaacacctctctatttatcaccaaatcggaacaaaagaaactgacgtccacacgacagacgggaacattctggactttacagaaccgaaccgggagctgaaacagctgctggagaaaaagctttccgattatgatttcgagccatttgacggagaccacaaatggacatactggcagccgctcatcaccccggcgctgaaaaaaatgctttaacactctatcatactttatttccaggagggacataatatgaaatacggaatcgttttatttccatcaaaaaagctccaagaccttgcaaactcttacagaaagcgctatgacccaagctactctctaatcccgcctcatttgacgctgagagcatcctttgaatgcgcggaggagaaagcggatcagctcgtatcacatttaagaaacatcgcaaaagagtcccacccactcgttctcaaaatgacaaaatacagctcatttgcgcctgtcaataatgtcatttacatcaaagcagaaccgacggaagagttaaaaacactcaatgaaaagctatacaccggtgtgttggcaggagaacaggaatataatttcgttccgcatgtgacggtcggccaaaatctttccgacgatgagcattcagatgtgctgggacaattaaaaatgcaggaagtgtcgcatgaagaaatcgttgaccgtttccacttgctctaccagttggaaaacggatcgtggacagtatatgaaaccttcttgctaggcagaggagaataatgtttgaaagcagttatcgcaaaaaatgaagaacaactgaaagatgcattctatgtaagagaagaagtctttgtcaaagaacaaaacgtgcctgctgaagaagaaattgacgaacttgaaaatgagtcagagcatatcgtcgtgtatgacggtgaaaagcctgtcggtgccggaagatggcgcatgaaggacggctacggcaagttagagcggatttgcgtactgaaaagccaccgctcagccggtgtcggcggcatcattatgaaagcgctcgaaaaagccgcggcagacggaggcgcttccggtttcattttaaacgcgcaaacacaggctgtgccgttttacaagaaacacgggtatcgcgtgctttctgaaaaagaattcctcgatgccggcattccgcacttacaaatgatgaaggactgaacgcatccggatcttttgagatccggatttttactgcatataaaaaaaccgttctctggtatgaacggttttttatacatatcgattaatatatgtccccattcctttttctcgcaatctcttataaagagagcgcttacgtttcatctcgtttacttttctttcagctgccgtttgattctcctgctgcttttccagttctttgtatacccgctgaaacgggacatagctgattttttcggttccggcataatcctgcttatgtccaatcgttctattagcatattgagcgtattgctggttctgaatttgacctgcatatatcatacaatacccacccctctgctgtctcttttcccttaaacttactttttgaaacacatttcttttgatatgatagtcattgtctgtaatgaacaccttttgattgggaggacccctttttgaaatgcgcccgactgaatgatagaatcatacatttacatacatattcgagagaacattatcaattcctctttgaagagggaataaaaggacatttattttgttctcattgcggaaagcccgttttgttacggcttaacatcgccgatccgccagagtttatccatcgccagccaggcgattttccggcatgtgaggaggcgtgcgaaccgaagccctctaaagaggggaaaaaagaagatgatcaggaatctggtgtcattcgtttacccaagggaaaagcgatcgccgctgacccgtccccagctgttacagaatggcaccgtcctagaagcattaaaccaggaacaccatttgtgccaaaaacaatagaacccgatacgagcctttttccgtctgtcggtttaaacacggatcagctgaaagctgtcacggaaacagagggcccgctcctcgtgcttgcaggtgcggggagcggaaaaacacgggtactgacagcccgtgccgcccacatgatcgaacacttaggcataccgcctgaaaatatgctgcttgtcacctttacaacaaaagctgtcgctgaaatgaaagagcgtatggcgaaccagtacggattacagccggcaaaagtcagaagaattgtgacaggaacattccacagtctgttttataagatcttgtatcactctaattctgctaaatggaacggtgagcatctgctgaaaatggagtggcagcgggaacaatatatcaaaaaagcactctatgaagaaggcatcgatgagaaagaatccccagttgaccaagccctgcagcagatcggtttttggaaaaacacttatgtcccaaatgaacgcatccctctaaaagatgagtgggaaaaacaagtttatcgtttatatgaacattatgaacgccagaaaaaagaacacagccaatttgattttgatgacatggcttcagcctgctatgaattgtttatcgagcggcctgaccttctggaacaatatcaatctcggtttacgtatatcttaattgatgagtttcaggacattaatccggttcaatacaaaatcatgcaaatgctcgccagcccggagcaaaacctgtgctgtgtcggagacgatgaccagtccatctacgcgtttcgcggaagcaatccgtctttcattcttgattttcaaaaggattatccgggagcgaagacgatctatttaactgcgaactacaggtctacgcacccgatcgtctctagtgctgatatcgttgtgaaaaagaacaaaaacagatatgccaaaacgcttgaagcggcccgcgatgacattcaggtccctgtgctgttttatccttatgatgaagaggaagaagccacaatggtcgtttccgatatcaaagaaaaaattcaaaatggagccagtccagaagactttgcggttctttaccgcacaaacagcggaggccgtgctatatatgaaaggcttcatcaatcgtcaattccgtatacagctgaccgcggcgtccaatcgttttacagcagacggatcgtccgccagattctcgcctacttgtacgccagccaaaatgaggatgacaccgaggcgattaaacacttgcttcccgccttgtttttaaaacagtccgctttgaatacgctgaaggcgctctcgattacagaggactgtaccatgatcaaagcgctggccaaattgcctgatctgaagccattccagctggacaaaatcaagaaaatcgtaccgttttttgcaagcctccgcacaatgaaacccgtagaagccatcacctttgcagaaggaaaaatgggcttctccgagtatttaaaaaagcggggcaatgagggcaacaagctggaaaaaggctctgatgacctgcgcgacatcaaggttgtcgccaagaagttcaaaacgattcctgactttcttgcccacgtagaccatatgagggccgctgagaaaaacagaacggatgaacatggcgttcagctgatgaccattcaccggtcaaaaggccttgaattcaaaacagtctacgtgttaggcactgtagatggctcgattccgcacgatttctcattagaaacggcaagaaaaggagacgaggccgctcttgaggaggaaagacgccttttatatgtagccatgacccgggcgaaacagcatttatatttgtcttgccctgctaacaggcgcggcaaaacagccaaccgctcaagatttttgtatcccctgctacagaaagcaagacagcccttgcatcattaacagcccggcagattactgccgggtttttactgtaaaaaaaggcccgctgcagtgagtcagccaggccatccacttatttattatccatcattttagaaatcgtgccaaaatcaagcttttcttttccgcttgtaatagattccacaattttatcttctaattcttttggcacgcgtctgtttgccatctgcgctacgcggttaatcacactgcgcactgtattttcatctttaaaattagcgttttggagtgatccggcaagattcattacatcctgcatcttcacacctgttttcttttcgatgttcttaaaaaattgattatccataatgcgcctccttttggcggagtaatacggtattgtatgaatgcacataatacaatgtgcttttccaacatttttaaaaataaacacaaggcaaggaagtacgggttataacccgtacttcctcaatacatcttaaaagaaagatgcacctacgatgatgaggagaatgaataatacgaccaacaaaacaaatgttgaaccatagccgccgccgtaaccgccagcataaccgccataacagccgccgccgtagccgccgccgaatccgtatccaaagcccatagataagcacctcctttactctctatacactatgtgagctgctgggatcggcttggatattcgcatagggcgtttgcggatttacgattgatcatattgagcttgatgttttttaagtaaggcctccgttttttcagccagctcttcaatctcatcttcaaattccagaccggctttatcaaatgcatccaagtcttttctgatactgcccatcgtgtcttcatgctctttttgcttttgttcatgtggttcatatcttccttctatccatttttcaaactcattcacttttatccccccgcttatgatatatgctgagcgagaccgcctcgttaaaaaaacaaaaaaccggagttctccggtttctttgccaggctattgaggctttttctttttatttccgcacccgcagcctttcttttttatcttttttgattgatacgatgaatctgtatatggagatttttgggaaggtttatgatgctgattcatttttgtccccttcctttccttatgtcatatatgctactttatgcgtattctgacagaaagttgctggtggtaacgccttattcttgcagccattttgatacgagcgtttctataatgccggcaaggccggcgatcgccaaaagtaaaatcagccactgcgccgcttgcgggatcaccgcctggcataaaatcaaaaagccggcacaccacacgcctgtgcaccaatagcagctcagcaattcaccaataaacgccctgacaccggttcccttaatcacgatataggtttcaatgttcccgtccgcatccttttcttccttctcttcatgaaacagactgcgaagcggcgccataatcgtgtcaaacaccagcaggcgggcgagccgaaagaccgcaagcgatagaagaacaattgtcagcccatttataaccactcgttcactcctttgccaatcatgatcccttcacatatatgccaaaaccctattcttcatgaattgtatcttgtccggcagaaaattggttatttttattattccgctctgcaccccatttgcattatatagagtatggataagaaaggagtgaaggttatgtcatttgaagaaaaagtcgaatccctgcaccctgcaatatttgagcaattatcaagcgaattcgaacagcagatcgaagtgattgattgcgaaaatatcacaattgacacgtcacatataacagctgccctttctatacaagcctttgtgacaaccatgattatcgtggcgactcagctcgtcatcgccgacgaggatttggctgacgcagtggcaagtgaaattcttattctcgatagctcccaaatcaaaaaaagaaccatcattaaaattatcaacagccgcaacatcaaaattactttgtctgccgacgagataataacctttgtacaaatcttgcttcaggtgttaaacagcattcttagtgaacttgacgtcctttaaccctttcttttcacaaacttaaaagacgaggtgaaaacaaatgtcagataacgataaattcaaagaagagcttgcaaagcttccagaagttgatccaatgacgaaaatgctggtccaaaatatattttctaaacatggggtcacaaaagacaaaatgaaaaaagtatcagacgaagaaaaagaaatgctcttaaatcttgtaaaagacttacaagctaaatcacaagcgctaatagaaaaccaaaagaagaaaaaagaagaagcagccgcacaagagcaaaagaacacaaaaccgttaagccgcagagagcagctcattgaacagatcagacaaagacggaaaaacgataacaattagccaatcataaaaaatagggttcttcatcaggatatatgactcagtcaaaataagaggctcgctcatttaataacagtaaaagaaaaggaggaatagatatggaaagcagaccatattcttgggttgcacttgatcctgactgtgaccatccgttagatgacaaagagaaagataaagaaaaacacgaaagaaaatgtcattgcgacgtttgctgtaatggcaatggtttttttggcaacgacaacgccttcatcgaccaagatctagctcaagcaaatctcaacaaacaagtttcagatgaaacgattattattagagattcttgtgacatcaatgttacatctacagacgttcaagccgtaacatcagttgtaacagcacttaatgccgctgtcgtaacggcaactctgacatcaattgcagacggcgtaattgccgaattagtcgcacaagatttgttacagcttacagctaacaaacaagtaaaccgccaaaaacttctcatcgaatgttcccgcggcgtaaacgtcacaacagtagatgccgatatcgcaacccttatttctacagcaacaaatacactcgtagccatcctagttatcactcttgtcctctaggacctaaaagcagagctaaaaacgctctgctttttcttattttccaagcatatgatgaatatatagacgttcacccacaccaagtggggcacgggtacatatgttgttaaggactaaagtcaaataccctataaagaaggagctgaaatcaatgagctgcggaaaaacccatggccggcatgagaactgtgtatgcgatgcagtggaaaagattttagcagagcaggaggcagttgaagaacagtgtccgactggctgctataccaaccttttaaaccctacgattgctggaaaagacacaattccgtttctcgtttttgataaaaaaggcggattgttctccacattcggaaacgtagggggatttgtggatgatatgcaatgctttgaatccattttcttccgcgtcgaaaaattatgcgattgctgtgcaacactgtctattttacgcccggtcgatgtcaaaggcgataccttaagtgtttgccacccttgcgacccggatttcttcgggctagaaaaaacagatttctgcattgaagtggatctcggatgcttctgcgcgattcagtgcctgtcaccagagctagttgacagaacatcgcctcacaaagataaaaagcatcatcacaatggataaacacttgtaaagaggaatccccttccaaactctattacaggtgcaaatcattcagctgcttccagcgtgaggcagctgactctccatcatttcgccagtctcaaatttataaggcaggagggataatatgagccagaaaacatcaagctgcgtgcgtgaagctgtagaaaatattgaagatctgcaaaacgctgttgaagaagactgcccgaccggctgccactctaagcttttatctgtaagccattcgttaggcgacacagtgccttttgcaatatttacatcaaaatcaacgccattagtcgccttcggaaatgtcggcgaactcgataacggcccttgctttaatacagtatttttcagggtcgaaagagtgcatggaagctgtgcaacactgtcattattaatcgcatttgacgaacacaaacacattttggacttcaccgataaagatacggtgtgtgaagtgttccgactcgaaaaaacgaactactgtattgaagttgacttagactgcttctgcgcaatcaactgcttaaatcctcgattaatcaatcgtacacatcatcattaatcataagctggaaaagcttgcaggcctgcaggcttttctctatgtaaaaaaagctgtccggcaacatcagccgggcagcttttttctttttcgttaaaaaccgagcgggtgcaaagaggtaatatcatcgattgccagttcggttggggctccgtttccggttgttcgaagcaggacggaatcatttcttcttccgacaatcacgcccctgtacgttcttccattggcttcaatcaaacaaagcgctctcggcatgttatgaggcagctttgttaaaaaatcaattttttcgtggatcgtcatcttgctcatcggttttttcacttttcgtgccggcggtgctttttcctccgctttatcagcactatggacagcttccggttctttctcaggcttccgggcctcaagtgcaggctcttcctttttttctgctttcgggggctcgtgttcaacggtttcttctacggcctgcggctctgccttctgttcctcttggctttttatgttctctggctctctcgcctcttgtgtttgctgactcactggttcggctgcaggcttttggtcttcttgcaggacatcctgtgccacggcttcctcctgctgcttctcatggtaagccggcttttcctcagcttttggcggagcgggtttgtcggcctttcttttgatgacaatctcctgcatggatgaccttgtagtttctgcataatccggctgaacaatatacatgagcggttttttatccgcgtttcttttcttattagacatcttcatccctccgattgtgtcatattctatctatatgacagaaagctgaaaatcagaagaaataaaaaagcaatccctattcgggattgcttgatatagatcctgcttagcgggcagtgatatggaaaccagaatcaacgtgaagattttcacctgtaatcccgcgggacatatcgctgaacaagaacgcagctgtatcgcccacttcttcaggtgttgtcgtgcggcgaagcggtgcacgctcttcgatgtcttttaagatagagttgaaatcgctgatgcctttagcagataatgttctgatcgggccggcagaaatgctgttgacgcggatattttcttttcctaagtcagcagctaaatatttcacacttgcatcaagagaagcttttgctacacccatgacgttgtagtttggcatcacaagctctccgccaaggtacgtcaaagtgacaatgcttccgccttcagtcatcatcggacgtgccgctttgacaacagcagtcagagaatatgagctgatgttatgagccaaaaggaagccgtcacgatttgtgtttaagtactcgccgacaagctcttctttgttggcaaacgcgatacaatgcgcgataccgtggattacaccgacctgctccttaatgcttgcgaagcaagtttcgatttctgcgtcgtttgtaacatcgcaagggaggatgatggaatcgttgcggtctaatgttccggcaagctcgtgaacggatttctccaggcgttcaccagcgtatgtgaaaatcaaacgtgcacccgcttcatgtaaagaacgcgcaatgccccaggcgatgctgcgtttgttggctacccccatcacaacaatgttacggccttcaagtgaaaaattcatatgtataaagcctcctatatttaataaagacatagtattagtacctgatcttaattcctatcatatcataaccttgtccagatgaaaagcgcataccgtagcaaacgcaaaagagatcaccatcagctggtgatctcatcggcttgtatttaagctgtttcgtttaaaagcgaaatggtttgtcggcccgtgtcccgatccgatgccgagcgtattttccaccgcttcacggacaaagttggccgcaacctcaaatgcctgatggatgctgtctcctttagccgtttgggccgttaaagccgcagcaaaggtgcagcctgtgccatgcgtatgcttcgtattgatataaggatgggtgatttgcataaacatgctgccatcaaaaagaaggtcagtaatgtgattgtcctcaggctggtgcccgcctttgataatgacatgctgcgcacccatcttgacgagctgctccgctgcttttttccggtcatccagcgagctgattgtcattcctgtcagcgtttctgcttccgggacattcggcgtaatcgcgtagcttcttggaatgagcaactcctttaaggtggcaactgactcatcacgcagcaaggatgccccgccctttgcgatcataaccggatcaacaattacacgattgaatccgtactcgtcaatttttcttgccacttcttcaatcatgtcggcattccagagcattcccgtcttaactgcatccggtctcaaatcctcagcaacagcgtcaatttgctgtctcaacgtctctacagtcagcggatgcaccccgtgaacgccaagcgtattttgagcggttaccgccgtaatcgcagacattccgaatacatcaagctcttgaaaggttttaatatcagcctgtatccctgcgccgccgcctgaatctgatccggcgattgtcaatgctttatatatactcattacactacactccttttattacccaatccatttatgataaatggattttgcccgggcaatatcatttgttccatggatcaaagctctgccgtcccggaacagcaccattttcatatcatccgagcggcaggaaattaaatacgggttcgcagctacttcaagcccggcctgcctcagctgaccggcaagcgcttcaagatccgcttctttcgtaatagatgatctgatctgcaccgtgttcctgccgcacaatacagccgcttttgtttgattttcataagacaaaaacggaaaatcctttgtgccgcagcttgggcatgcgtcatgtttgagactggccgctctcacttctgaccgctcgtttttccacaaatcaaaggagcgcagcaccggctcgcactcctctcccgtcagcagtttcagtgcatctgttacctgaaagactgctacctgcaaaacagccggactgatgatgccagctgtgtcacatgttgctccgccaatcggaagtgcatcgagcaagcaatgcaggcaaggagtagaacccggcaccacggtaaaggtaagaccgtagctccctacacaggcaccgtaaagaaaaggaatcccttcctttaccgcagcatcatttacgatcaggcgggtttcaaaattatcagccgcatccacaataatcgatgcatccctaatcagctcgaagatattttctgctgtcacatccatgacaaggccggtcacatcaacatcgctgttaatcgaacggagacggcgctccgcagcggctgctttcggcatttcttttttgacatcatcttctgtataaagctgctggcgctggaggttgctccattcaacataatctctgtcggcaattttcacagagccgactcccgctctcaccagcatttctgcactggctgttccgagcgcgccggcgccgataatcacggcgcgcgcttctttcaattttttctggccggatgggccgatcggagcaaacagctcctgccttgaatacctgcctgtcatacaggaagaccttctcccggactgcttgccgttccgtattgcttaagcgggattcggcccgcctcataagaaaggcgccctgcttccactgcgagcttcatggcacgagccattttcacgggatcgtcagcgccagatacagccgtattgagcagtacgccatccgctccaagctccattgcgtatgccgcatctttaggcgagccgattcccgcatccacgatgaccggtactttcgcctgttcaataataaacgacagattcaaaggatttaagattccttgtcctgatccaatcggagatgcacccggcatgatggcatgaacgccgagctcttccagctttctcgccagcacaacgtcatccgacgtgtacgggagcacaataaagccttcttcaagaagctgttcagacgcttttaatgtctcaacagggtcaggcagcaaggaacggctgcatccgatgacttcaactttaatcatgtcacaaaggcctgaagctttcgccagccttgcaatccgaaccgcttcttcagcagtactggcgcccgctgtattcggcaaaagcgtatatttggataaatcaagctgttccagaaaattcggctgagatgcttcaaaaatgttcattctccttacagcaaatgttaaaatatcagactcagaaacagctactgcttccttttgaatgtcaaacgatgggtatttccccgtgcccagcagcaatcttgattgaaatgattttccgccaattgttaacatgctcatccgcctcctacaaaatggacaatttcaatgacatcacgatcacaaagctcaacctcgtgatagcgttctttcccgattatttctttatttctttccacgataacgattttattttcaagctgatacgacgccagcaggtcttgaattgtacctgtgtcttttttccacttcacgtctttaccgttcagctgtagcatcatatctgaaccgcctccttgcgatcaattcggaatgcgtgcagccagtcttggttgacctctttattcatgatgagatcactgatcaaagcgcccgttgcgggagcaagcaggatcccgtttctgaaatggccagccgcaaataaaatacggctgtcctcaggatgtctgccgatgtacggttttccatcctttgttcccggacggagtcccgcccaaaaacgatccaccttcatattctgtatagccggcagcatcgtttttgcttttttcataacagattccaatccgccaagatccggtgtttcactccagtcccccggcttcattgtcgcgccgacaaccagtcttccgctttttctcggtacgatatagcagtgatcatggtaaagcgtttttgtcagcgggatatcatcattccaaacggacaggcactccccttttacagggagaaaagcattgttcagtccaagctgtttaaaaaacattccgctccacaccccgctggcaacgacaacatgattagcccatacgtctccgctaggggtcttgatgaacagggcttcaccgtcacgttcgacatgcaggacgggcgtatgctcaaaaatctccgccccaagcatttttgctgctttcacatatgccttgcaaacaaaataaggctccacatgcacatcatcctgaataaaagatgcaccaaagatgtcaccagacgcatacggctctttttctaacacctcttcttttgaataccagctgacagagtccaaatcgtccatctgtctcagctgcagcacatcttcttcagaaaatgcaagcttaaacataccgccgttatgctgcctgatatccacaccggataatgcataaagctcttctccaagacctttgtacagacgctgactgtgcatagcgaaatcaaaaaacgcgtcacgttcctcgcattcggcatgggcgcccagcattccggcagcggcacttgtcgttctgccgcccattgttccgctttcaaacaatgcggtgtttttgttttcctttgccaaataataagcaattgcggaaccgataattccgcctccaatcaccactgcttcataatgccttttcatagcgcatctcctttagcttgcgggaatatcgtctggctgcttccaaaggttcagcggaagagaaaattcctgacataacagcaatgccgtctgcccctgcttgttttacgtctcttaacctgtccggcgtcatccccccgatggctataaccgggatggaaatccgctgtttgatatctgacagcaaagatactcctctgccttcaagaccctttttgcaatccgtttcaaacacatggccgaacagcacgtagtccgcgtcttccttttctgcttgaaccgcttcctccagtgaatgcaccgacctcccgatatgaaggtgtggaaatctggctctgatctgcttcggtgaaaagctgccgcttggcagctgcacgcggtgaatagtagagaaaagtgcaatatccacgcgcccgttcatcaccaattttcgtttatctataccgccttcaaaaataagatcgagcagtttcaaaatatccgccgccgattttgagcgttcccgaatgtgaataaaatcaacttcattctgaatcgtaatgatgattctcgctagctcttctaccggcttgctgtcatccgttatggcgtgaagctccacattcctccacctcttttatggcgctgtcagaccagccttcttttcgataggccattccccaaaattgatattcatagtagctggagatgacaaaattctctttcatcttggcacgcacttcctccgtgctgttttccgccagctcatcaaagcggttgatttgctcctcgacctgttgtctaaaccaatcaccgccatatgtgccaatccacttctgataaattggatgccccggatcacaatgcagcaatttctcaccaacctcgtaatagagccaatagcatggcagcagggccgctaagatttctgcgaaattcccgctcaaaaccgaacggtacatatgggatgtataagagtacgccgtaggagacggcttaaacgccttacgctcttcctcgctgatttccaacagctcggcaaactcgcgatgaagcgccatttccgcctcatatgtaccttgggcatggcttgccatccgccccgttgtataaagatccttcgcataagcggcaccaaatgactgcacctttgcaaaatgcgttaaataataggaatcctgaagtacgtagtatttaaaacggtcaatcggaagcgttccgtcaccgattccttgaacgaacggatggacaaagctcccctcccaccattctgcggctgcactgcggcattcttctgaaaacttcacaaatcattccccctctgaaaataaaaaaaccactttcccgcaaggaaaagtggtttggaattggcatagtaaaataacacaaataccgctccacttccctacgcaggtctgaacctgttcaagttatgagggtctaaaagtcacacttttatctcagcccttatgaaggacacccctagtggttaaacgaatacatattgaattgttctgcacctctatattaacacgaatccttatttggtcaagatttatccttccaatgttttcttaagatccgttacgtacccccgagatccggtgacaattaaacggtctccaagtttcagcctcgtatccccatgaggaacgatgctgtccacacctctgaagatcctgacaaagatgacgtcacctgttaaagggaattcccgtaaaatgacaccatcatatttactgttctccatattaatttgatacagcgaagactcttggttcgtgagcagcttcatgacgccaggcgcttcaatcagtgcgcgaagcagcgtttttgtcgacagcagaatagaaaagatgctgattccctgctccttcagagctgcttcatgctccggtgatcctacgcttgcaatgactctttctgtgcctttatcttttgcaagtaatgcaatgtctgcattcatatcttcatttcctgtcgccacaacgaggatatccgtttcaaaaatgccgagtgattcaagcgtctcgtgttcatagtcagaaattgtttcaacagcaaacactgattctgacagcttttcctccgcattctcttggtagacgtgtacaacacgcacgtcatactcttcctctggcaattcgagtgtgacaggcaaagtcatttgattggcgccaatgaacgtaatcgtctttttctcctccggctgctcttcccgtttgtataattttttaaaacagatcggcgtaaaaatacttgcaatgacggctactaaaattagcgctcctgacatatttgtactgatcacgtgaagctgctggccgattgttgcagcagcaatcacgagcgaaagcgttgatgtcagcaggaaaccagacgcgaaaatggttcggttatcataccacttctttaagtacatgacaggaatgattttgctgactaacagcgcaagcagcaggagcggaatcatgattaaaattgttttatcctggaaaagagtccaaatatcaagcttcacaccgaccatcacgaagaaaatcggtattaagaacccataaccgaatgagtccagctgctgaacaagttctttgtttggcgaaagcagggaaacaagaacccccgctaagaaagcgccgagaatattttccgccccaagtgattcagacagggcaacgagtacaatgattaacgtaaaaatggcacgcgtcccgatctggatcgtcccttttgacatggattgaacaaaagagcgatgtttgaagacccggccgaaaaagtaaagcaccactccggccgcaaacagaatcatcaggagccacatgtttccgctgtcctctccgtataaagaagaaaaaacagcaagaagaatcatcgtggccaaatcagcaataacagcaacaagcaaaataatctgcccgatattcgaattcatgatccgttcttcttttaatgttggaacgacaacgcctaatgaaatcgttgaaataatcagggtcatcaaaaatgcattttggataaatccggccaagacgaacccataggacaagagcaatgataaaataaaaataccgacgaaaataacagatgccgcagcaaacgtattcggcgcttccttgccattcggcaggaactgctttttctttcctttctcaaacgacgaaaaatcaatttcaagcccgcttaaaaacattaaaaagataaatccgagcatagagagtgtctggagccaggtgtcaccctccacaactaaattaaggccgcttttcccaattatcagccccataatgatttcagcaacaacaaccgggatgctgagtttaaaccgatgcaaaaggatgggtgtcaaaaatgcaacgataagtacaacaactaaagatgcgacagatgtatgcgccataatcagaacctcctttttaagtcagggttatgctagttctcactcagagaacaaaacctcatttttaaaaaacataacgcgattttaacaagggtgatgatgaaaaataaagtgataaggtcttaatcctgtttagaaaatgattcttcttctataatttgcacataaaagcttgtgatgactcacaacactttgcttcataataaataaaacaatcggtaaggaggagaccgcatggcttacgatatcatcagcgatattcatggctgctatgacgaaatgactgcattaatccaaaagcttggctatacaatcaaaaatggagtacctgtccatgaagaaggcagggtgcttgtttttgccggagatttaactgacagagggcccaaatcgatagaggtcatccgatttgtagccggcgcttacgaaaaaggcgctgtgcgttatgtcccgggaaaccattgcaataaattatatcgttacttaaaaggaaatccggtaaaagtgatgcatggtctcgaaacaacagcggcagagcttgaggaactttccaaagatgagaaaaaatcagtcagcgaacagtttatgaagctgtacgaaacagcgccgctttacgacatcttacataatggagaattagttgtcgcccatgctggcataagagctgacgatatcggcaaatatacccgcagagtgaaggactttgtgctttacggtgacgtgacgggtgaaacatatccggacggcagacccatcaggcgtgattgggcggcagcctataacggaaaggcttgggtggtatacggtcatacacctgtgaaagagcctcggaaggtcaatcgcaccatcaacattgatacaggctgcgtgttcggaaatcaactgacaggctttcgctttccagaaatagaaaccgtctctgttccaagctccctgccttacgacgaatcaagatttcgccccatataaaaaaggagagaatcaatgattctctccttttatcagtttgctcatgtcctgaggcagtggagcatgaaacctcatgttctcctgtgtcagcggatggataaacgaaagatgctcgctgtgcagagcctgccggccaatttcctgtctcgttccgccgtacagtgtatcgccgcacaacgggtgcccgagatagctcatatgaacacgaatttgatgggttcgtccagtctcaagctgcaatgccaccgaggtcatgtcatcatttgcacatgtgacgtaaaaatgagtaacagccttctggccgtctggcgttaccgtccgttcaataatactgtcaggatgtctgccaatcggagcatcgactgttccctccatctgtgccatccgcccgtgaaccactgccgcataccggcgtttcacaaggccgtttttttgcgcagacgataaaatggagtgggcaaatcgatgcttggcaacaagcatgatacctgatgtatcccggtctaaccgggtgacaagatgaactgtcgccctcactccggttgtttgataatgatcaataattccattggcaatgctgccggaggggtgctctctcgaagggattgatgacacatacggctgcttgtttatcacaagcacatgttcatcctcataaaggatatcgagcggaacaggctctgccaacagcgtctcgctcacctgctcctcaggaaacttcacgataagaagatctccctctttcaaaacgtatttgaccgtcacatgctcaccgttaatctgcaggtctcccccgccaaacttaatatcggtcagcagacgtttcgaaattcccagttcaccggcatattcttttacagtcatcccgtcctcagcggaagtaatgttctttctgataaaaaaatgctccacgatatgtcctctttctattcaccttttccaataaacgaatcctggactcttttccaaaatggaaacggacggaatctcgcaaaccgcactttttcggatgcaacttggcagcggatcgactttacatccttatggagaagggttaaatggtcaatcgtcacttgaaagtcaacttcgtttctcggcttaatcatgcaatcatgatgggatgggagaagcagaggtgacccgaccgtacggaacacgcggttattaattgaagccatttccgcaagctggatcgccctgatagacggatggataatcgctccgcccagcgccttattgtaggctgtgctgcctgatggagttgacaggcagaggccgtcgccccggaaggtttcaaagagctgccctttgatttccacatcagcaacaaggcttccttcgatgcttttaatcgtacattcattcaaagctaagtatctttcttcccgctcgttttcgtgataggtcacaatgacttcgagaagcggatattcgactgtatgatacggcgttttcgcgatggcaagaacaagtttttcaatttcatgaggaacccagtcggcataaaaacccagatgacctgtgtgaacgccgacaaatgctgttttgtccaaacggtcgctgtatctgtgaaaagcatacaaaagcgttccgtcgcctccgactgaaataacgatttccggttcattttcatccagttccatatcaaaatccaataaatacgcctgtattttgcttttcagcgtatcagaaacttgatctccttttgatgatacggcaaatttcatgctcttcttcccctttacctattgttgctcgcttccttttttctttcttgaaaaggcagcttgagcttcctgtacttcacccctgatctccgacatctcttcatcaagccgggaagccgcttcagaagcgcgctgaagccttagttttactttttcaggaatgtttccgctgtatttataattcaatgaatgttcaatggtcgcccaaaaattcatcgccagtgtacggatctgtatttctacgagaacatgcttttctccggataccgtctgcaaagggtacagcacaacaagatggtatgatcggtatccgctctctttatgttccgcaatataatccctctgatccacaacggtgaaatcttttctggcaaaaagcatctcttttacgatttggatgtcatcgacaaattggcacatgattctaaggccagcaatgtcctgcatggtttcaatttcatgcagcggtatgcttttccgtctcgctttttcaagtatgctcgccacaggcttgacgcgtccggtcacaaattcgatcggtgaatggtcgtcctcgtattcatatagtgtgcggatccccttgagcttcactttcaactcttcgacagcctggcggtacggcactaaaaaacgctcccattgtttgtcatccatcatacatcccccaattccgaaccagtttctataaaaacacgcgtttcactttttcttccatttcttctccatagtttgcattatcttttatattttctaaaagatattccagctcctcatgcaggcctgccagttcaattgtttggtctcctgcctctaaaacaaccggtattttttgtgcatgggcctgcttcagttccggccatacatgttcctttataatgacatattcaaaagaatcagctaattcaagtatgtatacaaaagcaaagtggtcagaatcaacaagcatttgacctgacggcttgcgttccgcttcgtttccttctgtctgacaggcaaggcgaagctgatcatccgataatgttgcattcaaaatttcgattctgttttgcataatgctctccttttttaaacaaagtacagattcattttatcatatcgagctcgatattgataaacctaacatctaaagagataatagtaaaaataagatttacagggcggaaaggaagagcatcatgagccaagagattgaaatcgaatttaaaaacatgctgaccaaacaagaattcaaaaacatagcatcggcactccagctgacagaaaaagattttacagatcaaaagaatcattattttgatacagacagcttcgcgctgaaacaaaaacatgctgcgcttcgtatccgcagaaaaaacggaaagtatgtccttacattaaaggagccggctgatgtggggcttctggaaacgcaccagcagctttcagaggtatcagatctcgctggattttcagttcccgagggccctgtgaaggaccagctgcacaagcttcagatcgatacggatgccatacaatactttggatctttagcaacaaaccgtgcggaaaaagaaacagaaaaaggcttaatagttttagaccacagccgatatttaaataaagaggactatgaaattgaatttgaggcggcggattggcatgagggcagacaagccttcgaaaagctgcttcagcaattcagcattcctcagcgcgaaaccaaaaataaaattctgcgtttttatgaagaaaaacgaaagtctatataaggtggaatgacatcgtgaatgtaacgaattgggcagcattacttcagcttcaggcattacagtccatatctaatgcacgcagcagctcggacactcagaatacggaaagcccgctttcaagtttcagttctttgctcagccaatatacaaacggtctgacatctcagcaatcagcaccttcttcatcgccaagcccgctcagcatgctgaacagcgcgaatacaacagcgccgtcactgctttcagcgtatgggcttaactcatatacgagcagcaattcaggttcagtcacaaaagcggcagaaagcactgaaacagctgttgcagattcagcttcaaacaaacatgaagcaaatcagatccgttcgggagacttctctattgacagtgcgattaaaaaagccgctgataaatatggcgttgatgaaaaactgatccgcgccgtcatcaaacaggaatcaggctttaatgcaaaagcggtcagcggagcaggtgcgatgggcctcatgcagctgatgccgtcaacagcaagctcacttggcgtttccaatccgcttgatccgcagcaaaatgtggagggcggaacgaaatatttaaaacaaatgctggataaatacgacggcaatgtgtctatggcattagcggcttacaacgccggaccggggaatgttgaccgatacggaggcattcctcctttccaagaaacgcaaaactatgtaaaaaaaataacttcagtttattacgcgtaaccagaggtgctctttccctctggtttttttgcgaagtgaaatcttacgcattcctgatttttatgtgatatgatatgaaatacaaaccccggctgtcagccgaaatgagtcatcaaacgcataaaaggcagtttgtttgtagaaatgatgccttgttgctaaaataaatctagatgaaacaatgaaatacagaaaattactttttgcaataggatttatgattcctattagccatatttaaaggagtagtcaacatgggacaatcgtttaacgcaccttatgaagcgattggagaggaacttctatcgcaacttgttgatactttttatgagcgtgtcgcgtctcatcctttgctgaagccgatttttccaagcgatttgacagaaaccgccaggaaacagaagcaattcttaactcagtatttaggcgggcctcctctttatactgaggaacacggccatcctatgctcagagcaaggcatcttccctttccaattacaaacgagagagctgatgcgtggctcagctgtatgaaggacgcaatggaccatgtagggctggagggcgaaattcgtgagtttttgtttggccggctggagttgacagcaaggcatatggtgaatcaaacggaagcggaggatcgatcatcttgacaaactatcagcatgagctatacttcgcccattgccacggtcatccaaaaaaaccgcttgaaatttatatgtttgtagaccctttatgtcctgaatgctggtccttagagcccgtcatcaaaaagctgaaaatcagatacggacgttttttcaccttacgcattatcgcttccgcaagccttaccgctttaaataaaaagcgaaaaaagcatcttctcgcagaagcatgggaaaagatcgcgagccgctctggcatgtcatgtgacggcaatgtctggttcgaacaggatcagccgctttcatcgccttatatggctgctctcgcttttaaagcagccgaactgcaaggacgaaaagccggcatgcaatttctcagaaatatgcaggagagcctatttgtttcaaagaaaaatattacggatgaaaacgtgcttttggagattgctgaaaatacaagtctcgatcttgaagaattcaaaaaagatctgcattctcaaagcgcggtcaaggcgcttcaatgtgacatgaaaattgctgccgagatggatgtttctgttaatccgacactgacgttttttaatacgcagcatgaggatgaagggcttaaagttcctggcagctactcatatgatgtatatgaagaaattttatttgagatgcttggcgacgagccgaagccgtcggaaacaccgcctttagaatgttttattgaatatttccgcttcgttgcctcgaaggaaattgctcttgtatatgacctgagccttgaagaggtagaaaaagaaatgaaaaaactggcgtttgctaaaaaggttgccaaagtggaagccaaacacggaatgttttggaagtctctcagcacttattctgatgaatatcaatcatgtgaaaaatagccgcaggcgtgcatatgcttgaggctgtttttttatgccataaccaaacgtacgttccatttttagcactaaagaaaccgcgccgggataagcgcggtttcatatgtcttaacgacaacaaaggggatgggagaaatttttcacggtcaaacaaaggggtaatgtttgtttgtgatcaatttcacatccttatgataacaaaagatgtcgacttttgacaacctctatgcttaatgttcatatttttgtcacaaaacataacgaagtgcattcactcatatccttataaggaaaaaggacgaggaggaccgccatgatgtctactttgatctcaattgtgtgcattgctgtttttttctgcttgaatatcttaggcatgatgcatatgctgccgctttatattacctctcctctgctgtttctgtctattttgtttaccctctaccgcttgaatcaccggaaaacctttaaagggttttaaaaaagcctgtgcgtcatttccgcacaggcttacttttttaagactgcttgactttcatcagcagctcttccatttcatcaagtttttcttcaaacattttgcacgcggcttcgattggctctggagacgtcatatcaacacccgcttttttcaggacatcaatcgggtattgtgagcttcccgctttcaggaagtcaatataacggtcaaccgccggctttccttccttcaaaatctggctgcttaatgcttgggcagcgctgtaacctgtcgcatactgatacacatagtaattgtaatagaagtgcggaatacgcgaccattcaaggccgatttccttatcaatcaccatgccgtctccaaaatactttttattcaggtcgtaatagacatttgtcagaagctcaggtgtaagcggctcgccttcttgcgcctttgtatgaatcagatgttcaaattcagcgaacatcgtttgtctgaagaccgttcccctgaagccctcaagcatatggttgagaatatataagcgctgtttttcatcctctaaattgttcagcaaatattcgccaaggagcgcttcatttgtcgtagaggcaacttccgcgacaaagatgctgtaattgccgtatggataaggctggtgctttctcgtatagtagctgtgtacggaatgtccaaactcgtgcacgagcgtaaagagattattgacgttattatgccagttcatcaaaatatacggattcgtgccgtaagctcctgatgaataagccccattgcgtttgcctttattttcgtaaacgtccacccagcggttttccagtccttcttttaggatagaggcatattcttcccctaaaggtgcgaggcctttcagcatgtaatctttggcttcctcgtatgtcaccttcatcccagcatctttcacaagcggtgtatacaggtcatagatatgcacttcatcaagctcaagcactttctttcttagcgcaatatagcggtgcaggagcggcaaatgcttattaatcgtcttaacaaggttatcgtatacttcctcaggaatactgttgttagaaagcgcagcctcacgcgcggacttgtactttttcactctcgcgtagaagttgtcctttttcacagtgccgcttagcgtcgtggccattgtgtttttatattgtccgtacgttttatacactgcgtcaaacgcatttttgcggacttcacggttttcactttccaagaaattaataaagttgccgtgagtgatctgtttttcattcccatcttcgtctttaatggatggaaacgttatatctgcgttatttaacacgctgaatgtatttgaagatgaccccagtacctcggaggcttcagcaagcagcgcctcttccttctcgctcagcacatgcggacgttcctttgtaatctcctcaatcgcatgagagtacagcttcaattcttctttttcaagaatgaactgctgcagtttgtcttcttctatggataaaatctccggaaccaaataagctgtcgcgcttgcggcctgtgtatacaggtttcccgccttgtcattcagcccctggtaaaaggagttcccagtatcctggtcagagcgcatatgcgcatatgtgtacagcctacctagccgctccatcactttatcttgatacgtaagagcctcgtataaatgatcagctgaatctgccagctttcctttatacttagataaattcggaattaattcttttacagcttgaaattctttattccaggcctcatcactaggaaaaatatcctcaagtctccatgtgtcttctgcctttacctcacttctgtcaggcagttggtttgcttttttttcctcagccatggtgatccccctcgtcttctttgattcaagccaattgaaaaaacagctgtttctcaataaacttgtgttgtgaatatcttccggtttttcactgccttttgtcaaatcatatgcagtaatgaagagaacgaatgccaaaaaagcagtaaaaacacgaaaaacctttccttttgtgcctttcacagcctgcccaccacctttgtcttagggtgagccaaataagacaaactcattctataaaacagctgcggtctctttctatgagatcctgcatggagtgtatgcctcctgcaggctgattcagcacatatacttctttctgagtctcccttaaaaatcccttcttgcacaaaaaatcaatatactgtttaaccgcttctgaaagacactcttcgctgcattcggacctgagtgcaatgttcttattatgaatgtgcagtttgcactgctgcaaaacggctgaaaaacgaattggcgcacgtttacctccaagatccgtcataaacaaataaagaaacccctgccacacaaaaaccggactcttaaaaactgccccttttctaacaggaacaaacacttcagtcggcagaaaagaaaaaggcgtctgtcgtttctcataaaacagcagcctaaggcgatttgtttcctttgagttaaaccgatggggtttatggcgaaaacggtgaatcgctttcgtccagcctgaatattgaattgagggtttcggttcagtgaaaaaaagatcgcctgcacctgcccgatggatagggatcgtttggactgaggaataagaatggtttgtgtagaatggaatgatgtggctgagccggagaaaagaacgcctttcaggacaataacatatcagttctctgtatggacttgcattgataaactgccaatgaaaagttgaaagctgataaaaggacgaagcagtccgttttaagcggctgtatcccataatccactgcgggatgattccttcttgtttgaagccctctgtccgcttttgaaagacatctggagcgatagtggcgcattgatattcaacagcaagcatatgctccttgattcttgccatgacgtccggtctttggttgattgtccttatatacggctccaatattggtgaagcccgttgcgttttcagccatacatacagctgtctttttccttctaagtggtaggcgctttccggctcgatgtctatggcgcaggacttgttctgtttatgggcaaaatgcggcgctttttgaagtccgagcttcacagctagctctcccccgcataccggacagaagaaccgtctccgctttaatttctggttttgctgagcgcctagaaggtgaaacatttggccgtcttcagtcacagcactaaacaattgtcatctctcctttccagatgaagtatactttctggaaaagatgatcaactcctgttcgctgtattttctgcttgtctatatgtttttgatttttcacatctctaaaatggcattttcgtgcataaaaaaaaccgatttccggaaggaaatcggtttgctatgatgcaaagtgtttttttatcgtttctagagcatgctctgaaataatcagcttgccgtactcttcaagacggtgtatgctgattgaggattcagttgcgtactccagcaggatgcttagctgattttcaacctcttcatcagtcatattgcaaaaatctacatataaataatatcggttctcaaacgaatataaagtcgttttgcttccgttaacgttcaatttagatagagaaataacatcctcaaaatcgccaaatcgcaagacaaattgaagcttttgctccttctcttcctgattgacggcttgctcttctttctggaaatcatccagcaaggcgtcaagatcctcagatgctggttcttgctttttatcctcaggaatcggcagttcgagcttttgtccgtctttggaaagctgggcttttgtgacgatgatttctaatcctttgtccagtgcctgaacttgaatccaaagtgggccttccacagcgaattcctcttcttcatgaacttcatccatgacttcccagaaaagttcttcactgcgctcacggttataccaaatttcttctctgtcaaaaccgcgatcttcaatatctccgtaagacatataaaattttactgtatgctcgttaattctttcaatttccatttgccaaccttcccttctatataagatgttgaagggacatctaagctcccgattaattgtactttactacactttacccattccgtccacatcttaaccttaaccaaggccagtgtgaattcctttgtatttctattttatgataaaacagtcacaaaagaaataaaaatgcacctttgcctaaaaaacggcagatcaggcggctgatatcataaaatatgacctgtctcatatagtagtagtacaagcgaaggactgaaagcgaggtgccgcttcatggagcatgactatctgatttctctgctcgtcattgttgggattgacctgatcctcggcggagataacgcggttgttattgccatggccagcagacatttgccggacaagcaaagacagcaagccattattctcggaacatttattgccgttgccatgagaatcggattaacaagtgcagcagtatatcttttgaacattccgttcttgcagtgcgccggcggaattttcctgctgtatttaggatatcagctgctgattgaaaaaaaagacacgaaacacattaaaagcagcacctccctgtggagagcgatacgaacgattgtgcttgcagatctctttatgtcgctggacaacgtcatcgcagttgcgggagcttcacacggtgagttttctctcgttgttataggattgtgtgtatcggttccggttattatttggggcagcaaactcatccatattgcactagagaaaataccgcttctgatttacgcgggaagcgggctgcttgcttatactggcggagaaatgattgtcagagacaaaaagctgtcgctttttatggcgcagcacggcacagtcgaaacgctcctccccattttgacggttgcgtttgtcatccttgcgagcatttattaccagcaggttgaaaaataaaagaaggctgatgactcagccttcttttgatgatacgatctattagtttgccaaacgctgtgcttctcttaattggaaagagcgaacttttcttggcaggaaacgtctgatttcgtcttcgttatatccgacctgcaaacgtttttcgtcaatgatgatcggacggcgaagcaaacctggatgctcgttgatcaagcggtacaaatcttgcagcggcatagattcaacgttcacattcagtttttggaatacttttgaacgggttgagatgatttcatctgttccgtcctcagtcattcgaagaatttgttttatttcatcaattgataaaggttcagagaaaatgtttctttctacaaatggaatctcgtgctcctcgagccacgctctcgcctttctgcatgaagtacagcttggtgatgtgtatagtgtaaccattcatcttcactcctctaattagtaggatgaacatctattttattcttaaattgaaattactctaaaaaaggaatctttacaggtattatactataaaaaagtaagtgtgaacagtatcctaagaaaaaaatgtgtcaatccagcaaatttttaatgttcatgatatgttcttattctcaattagcttaactgatcgaaaatatttttttgtttttcttcatcgatgatttccaagacctcatccgttttttcgtacgattctccgtaccatttctcatctttataagtatgaatgttttcatatgtctgtttcatggcttcaagaatttcttcttctgattctgtttttggtgaccagtacagaatctccatcttgtttacttcattcgtagccaatgaccggcgccggtacccaattgactgagcatgcttgaaatgctctctttgataaaacctcaggcgtttttctgtatcagtatcatcttcatccacaggttccacctcgagcaatatgggcttatttttctttttcagcttcgcgatcaatttgccgccaagcccctgccctcttgcatccttagacacatacagataatcaacgaagataaaagaatcgaattccgcaaacattaaaatatgatgtttgccttcatctttatgataaatatcgcttcgctctttcagaagagcttccatatgcgcttttgatttcatttcttcaattggaaagtactcgctaagcttttcataccagttcattgatttgctccttatgagttcgttgtcttcatacttttagatataccccatttcttcttgtttaaacagccttacatctataaagacgtgcgaacttccgccatggtttcatttttttttcagcaaaacggagccagctgctccgttcattttgaagtgtttctcattgaactcgattttctcgcctgtaatgaaccagacggggctgcgccagtgcaatcagaaatgtcatgatatataatgcagcagccgcgataaaagctattttcgcaccagcagcatcagccactagccccataatggagtaggtgacgcctgaccaaggagtcaaaatcgcattttttgcagccatgattccgattcgtttctgctcgggaataacttcctgcagcatggtttcctggcaaatatcacgcacctgataaaaaggccccattgcagcacaagccagagcgcataaaaatgggactggagaaaatgaaaacaaaagggtcagcgccgacattacaagcgagctgaacataatggcatagcccatattccgctcaaaaaaagaagaaaaacgaatagcaatcacactgccgacaattgcgcctataaaataggaagcgttaaacatcccccaccacacctctgtttcatgcaaaacagccgcagtaaatgcgaggagaatagcagatgaccatacggaacccgccaaagcttctaacatgtccattacagtaatgtctcttacaatagggatgatcattaaatccttccatatacttctgacagatgctgtttcagcagttcctgcagcctcttcttcatttacatgcagcacactgatggaagctcccgatagaacaaacaggcaaatggcagcgccgacaacgagttcaaaagggacggcgtacgtcagaaggcctccaaggccccagcctgctgttaagaacaattgattcgagagggagatcacaccattcgcttttacatattgcttctttggaacaataatcggcagcagcgcaaatcttgccggctgaaaaaaagcgcccgcgaaggaaaaacaaaacacaaacagcagcgtaatccaaaagaatgcctgtccgtgatgagtgacgctgtatgccatcagtataataaagaccgctctcagcagattcgctcccgcaagcacctttttaaaaccgagaatgcgaagcaccggagagacgcaaaagcttgctgctatactcgcaaacgacatgaacgataaaataaggcccgccaaaaaaacggagtcagtcatttgatagatccggaccattaaaacgattgtgacgaggactcctgctaaagattgaaaagattgagacagcaatagcgcaaaaacatttttgttatgcagaaattgaatcgtatttcgcctccgctttttcctctaattgtaaatgttatcattctcactttctatgaagacgcaaaaaaatccttcaagagaaatctcttgaaggattgatgaatcatgaaaaagctttaaattcggcttccgtgcacatcacaaaatgtcccggtttgacttcacggaattccatcgtttccccatcctttaattgatggacagacggatcatatttctggcgaacgcgatttctctcatagtccggatcaggaagcggaatcgcagaaagcaatgattttgtatatgggtgaagcggattttcataaagctcatctgccggcgcaagctcaaccagtttcccgaaatacatgacgccaatgcggtcactgatgtatttgaccatcgataaatcgtgggcaataaacaggtatgtgagccctttttctttttgcagttctttcattaaattcacgacctgcgcttgaatggatacatccaaagcggaaatcggctcatccgcgataatgaattccggatcaacagcaagcgctctggcaatcccgattctttggcgctggccgccggaaaattcatgaggatagcggttcgcgtgttccttgttcaatcccactgtttccaatagttcatgaactcgctgcatccgctcttttttcgtttttgccagcttatgaatatcaaggccttcagcaataatatcagcaactgtcattctcggattcagggatgcataggggtcttggaaaatcatctgcattttgcggttgaattccagcagctttttccgcgattttctcccgtgcacattttcgccgttgaacagcacctcaccatcggttgcttcgtacagcctgataatgcttcggcctgttgtcgatttaccgcagccagattcaccaaccagccctaatgtttcacctttatagatatcaaatgataaatcatctacagccttaaccgttcccctcggcgtgacaaagtgctgttttaaatgtttgatttctaatagtttttcagtcaattcattcaccttctctcactaagacaggtttttcaaacgtgtttgccagtttacgcattttcgcttttaccgcttcaggcggctctacctttggcgcgtcaggatgaagcagccacgattttacataatgagtatcggataccttaaacattggcggctcctgttcaaaatcgattttcatcgcgtaagagctccgcagggcaaaagcatctccttttggcgggtttgtcaaatcaggcggcgtgcccggaattgcagtcagctcttcctctcctgaactttccagtgtcggcatggatgcaagaagcccccaagtgtacggatgtctcgggtcgtagaagatttcgtctaccgtaccagtttctacaatctgtcccgcgtacatgacagcgacccggtcagcaacgttagccacaacaccaagatcgtgtgtgataaagatgatggacgtgtcaattttcttttgcaaatccttcattaattccaaaatttgcgcttgaatcgttacatcaagagcagttgtcggctcatcggcgatcagaagtttcggattcgctgcaagcgccatggcaatgacaaccctctgtctcatcccgcctgaaaattcatgcggaaattggttcacccgcttttccggcattgggataccgactaattccagcagttcaaccgcgcgttttttagccgcttccttcgagatcttttcgtgtttaaaaagcacttccgtaatttgtttaccgaccttcatcgttggatttaaagaggtcatcggatcttggaatatcatgccgatctcttttccccggacattttgcatttctttttcggacagcggcaccagatcctttccttcaaacaggatctcaccgcgtttgaaataacccggaggcattggaatcagcttcataatcgcttgagaggttacactttttccggaacctgattctccaacaatggccagcgtctcccctttatccagatggaaattcactccgcggatcgcctggacctctccgccatatgttttaaatgaaattgctaaatcttttacttctaataggcgtgtcacccgtatcactcccttatttacgtaacttaggatccaatgcgtctcttaatccgtcgccgacaacgttaaaaccaaacattgtaatgcagataaatccggcagggaagaataaacgccacggataataggtcaatgcaggcaatccgtcagaagccatcgttccccagcttgccagcggagccggaacaccaagtcccaaatagcttaaaaaggcttctgtaaaaatcgcagtaggaactgtcagtgtcatcgtgaccaaaatagaacccattgcgtttggcacgatatgtttaaatagaagacgggatgtttttgcacccagtgtctgtgaagcaagcacatactcctgattcttcagctgcagcacttgtccgcgcacgattctggccatattaatccagcctgtaatcgtcatggcaataataatcgtaaatagacctttcggaagaacaaccatcagtaagataaccattaataatgaaggaactgcccaaaggatatcagcgatacgcatcatgatttcatctgttcttcctccgcggaagcctgaaatgctcccccaaatgacgccgatcagcaaatcgagaacagcagctgcaacaccgataaagattgagattcgcgcccctacccatgtacggacgaaaatgtcccgtccaagatcatctgttccgaaccagtgatcttttgaaggcggcttatccgcatttaagagattagtagttgaataatcataccttgagaacatcggcgcaaaaattgccataaggataataagtacgataatgataagcccgaccattgcaagcttattgctgcggaagcgaagcatcgcatctttccagagggaaaggctctttttacttattttttctgcatcgccggcattcgctgcggctggttcaaacatgttttttggaatgttctgcatggcctaggctcctttctttgctttggaaagcttgattcttggatcaataatgccgtataacacatctacgattaatacacacaatagcaagatgacactgaagaacaccgttacacccataatgaccgtataatcacggtttgtaatactgttgacgaagtgtgcaccaagccccggaatcccaaaaatggtttcaataatgaagctccccgttaagacctgtgcggccatcgggcccatatatgtaacaaccggcaaaagtgcgtttcgaatggcgtgccgcactgtaaccgctgggcgggaaagccctttcgctttcgctgtgcggatataatcactgtttaacacttcgatcatgcttgaacgggaaagtctggcaataaacgccatcggcatggaagcaagtgcgatggaaggcaaaaaggtgtatgcccaggaatcccaccccgcgaccggaaacagcccaagcttcatggagaacacatattgcagaacagccgccatgataaagctcggaaccgaaataccaaatatcgttaaaatcgcgacggtataatcctgccacttattatggtaaagggctgcaatgaccccaaacaatacacctaacgctaaagcgaggagaatagcttctgctccaagagtaaatgaaacggggaaacctgaactgatcaggtcgttaacactctgacctttatatttaaatgacggtccgaaatcccacattgcaactgatttcaaataactgacatattgtacaaacagcggcttgtccaagccataatgcgcatttaaatttgcttcaatttcaggcggaagctttttctcacctgaaaatggcccgcccggtgctgcttgcattaagaagaatgtcacagttacaatcacaaatagtgtgataatcatatagactaagcgtcttccgatatattttagcaagggggaacacctccatggtttttacatttttatactccatcagtaagaaaggtatatggggcttttctccccatataccttgaggtcttttattttcagacgtagccttatttaaaatatgcgtttctgaaataaacctcaccagtacctggcatgataacaccttttaggttttcatcctgtacccaagtatcagtatagaaatagattggggcaaccggcatttcatcaatgaaaataccttctgcttttttcagcagctctgcacgttttgttttatctgtttcagtttgtgactgattcagaagctttttgaattctggattttcccagcctgtatcgttatttcctccgtttttgtcgcggaacaattcaaggaagttgataggatcattgaagtcgccgagccagcccatacggccgatttgataatcttggctgtggagcttatcaatatagacattccactctgagttatcaagctcaacatcaacgcctaaatttttcttccacatttcttgtactgcttgagcgattttcgcgtgtgcgtcatcagtgttgtaagacaatttgatttttggcaaatcagatgccttgcttaagcccatttcttttaggcctttttcaaggtattcttttgctgttttgacatcattgtctttgaagtatccttctttgttatcctcaaatcccttcattgtaggcggcactgcagccattgccgggatttgctctccttgcgtaacgtttttaacaatcgactgacggtcaagcgaatatgttaaagctttacggatattgacgttgtctaatggcttagcttcagtgttgaatttgtaccaatacactcctgcaatcggctcaacatgtaaagaaccgtcttttttcagggtcggcagggattctgtcggaagctgtccgagcggcataccggcccaatcaagttcgccagcttggaatttttttagttccgtattgttattgttgatcataaccatatcgattttcttcagtttgactttgtctttatcccaatactggtcatttttttcgagagtaatagagccgctgtgtttccatgccgtcattttgaacggcccgtttgatacataatcatctccggcatttgtattccactttttatttttctctgcaattttcttattgatcggcatatacgtatagaacgcagttaattcagtgaaatatggagtcgggttatttaattcaaccttcagcgttttgtcattcacagcttttactgccacatcgtctaggctgccttttccggtattcgccgcttcagcaccttttatgtagtagagctggtaagcgtattgtgattcattattagggtcaagcgcccatttccaagcatattcaaaatcttgtgcagttacagggtctccattagaccatttcacaccatcacgaatggtaaatgtatatgtctttccgtccttgctcgtttcaattttagaagccatgccttcttcaggctcaccatctgcattgatacgtgtcaatccttcaaaagtctgacggataacaccgcctgatactgaatcatttgccaatcccggatgtaaggagaacggctcagttttaatattaatgttaagtgtcgtctttcctttactgtcctttttcccttcaccgtttgatccgctgccgccaaagccgcacgcgctcagcacgagagtgaaaatgagcatcaacgtgacaatcgaccaacgttttttcatattcgcaaaccccctaataataattttcagctccttacggctaaatcctcagaaatatcagacaaatgaacctgagtttccacaacttttattctgttccgtcttttctgattatttttgtaaaaaagctgtaacaatagagtgaacaagttcattataatgaaacaaataatttattgcaatattattttatcaatttaaaatatttaaacttcgttagtttttcttccatgaacataatatccttctaccatttaaagcataaattgattaaaaactttttcatgtgttttctgcccatattgctttttacatataatatctgcctgtttttacgctgatagcagttatcatttaaggattttacagcactcgtgttatttatattattacaattttactggaaaaaagaatgttttttcatgatgacaattggttataattgatttataatgaagcaatcaaaagaaaagcttgctatgaaaaagagtagtacacgtttcacctgtttgaagagagtctgcggtgctgggagcagataacgggcaatgtggaatggactttggagcagctgaccgaactggaaaaaagtaggctcagccggagcagtctccgttacaaacgtcagagtgattccattttaatggaataatcagggtggtaccacggttcattcgtcccttttttacaggggaagaatgagccttttttattatgttttaagaaatgaggttgatgttttcatgaaacaaacgattttttcaggcattcagccaagcggctcagtgacgctcggcaactatatcggtgcaatgaagcagtttgtcgaactgcagcatgattataacagctatttttgcatcgtcgatcagcatgcgataactgttcctcaagaccggcttgagcttagaaagaatatccgcaatctcgcggcgctttacttagctgtcggacttgatccagaaaaagcaacattgtttattcagtcagaggtccccgcacatgcgcaggccggatggatgatgcagtgtgtcgcctatatcggcgagcttgagcggatgactcaatttaaggacaaatccaaaggcaatgaagctgtcgtctccggcctgttaacatatccgccgctgatggccgctgatattctgctgtacggaacggatcttgtacctgtcggcgaggatcaaaagcagcaccttgagctgacgcggaatcttgcagaacgcttcaacaaaaaatacaacgacatctttacgattccggaagtgaaaattccaaaagtcggtgcacgtatcatgtctctgaatgatccgctgaagaaaatgagcaaatctgatccgaatcagaaagcttatattacattgctggatgagccgaagcagcttgaaaagaaaatcaaaagcgcagtaacggattctgaaggcattgtcaaatttgataaggaaaacaaaccgggcgtttccaaccttcttacaatttattcaatcctcggcaatacgacaattgaagagcttgaagcaaagtacgaaggaaaaggctacggcgagtttaaaggtgatttggcagaagtcgtagtgaacgcattaaaaccgatccaggaccgctattacgagctgatagaatctgaagaattagaccggattcttgatgaaggcgcggaacgagcgaatcggacagcaaacaaaatgctgaaaaaaatggagaatgccatgggtcttggaagaaaaagacgctaatcaaaaaaccgctctttgcaaagagcggtttttttcagttgacctttgattcgttttccatttcccaaagcttttcgaaaaaaggctgtccttttattaggttttcgcaaaaagctaggtgtttgtccgaccagccttcaattgtttcgttatacagcatgtcccaaatctcttcaaagctcatccttttgatttgttcatacatatgcggattccactctgtgtaccagtagccaatttccgctcggtttttcagcccttttaattggtcaagcgccataaacatcagctgcttaatttgccgttcttttcttgtcagtcctctgacatgttctggtgctaatgataagatgtgatattccttggaggattccagcttctttggctcaaattcatatgtttcaggctctacatcttttaccatttcataaacgagctgctcctgtcttgggattagacggctttttctgacagggatcgtgtagccgatcgtgtcaacagctaaaatgccgattccgtctgttacgacaaaacaatactcaagctttgtccgctcatgattttttcgaatgtacgatttctgatgtacgtcttcaagcaaacctttcggaagctctgacaaatcgttttctatgtaatgaaacagtactgacggcacccttaacagcggcacctgatccaaaagctcaaccgtatcttccttgcgccattcgtgaaagtggcatacattgtagccattttcttccccttcaaaccaattgacccacacatcatgaagaaataacatctctaacccctcacttttataaaaactgttgtccacagtataggcaagggatagagaaattattccaaagagattgaggaaatctggaatcactgggtttatgtaagaatcataaaaagcagatctctttgtatattttctgactaaaggagacctgcttttttctgatttggtgatattttataacagatatgatattcatttttatttaatatttttcgggtcaagcgcatcccgcaggccatcaccgacaaagttgaagcataaaacggtcattaaaataaatagcccgggaaataacgggtaccaccatgcttgaatcattactgtgaaattctgtgcgtcttgaagcatgttcccccagctagcgattggcggctggattccaaagcccaagtagcttagcgccgattcagctagaataacagacccaactttcagcgtagctgacacgataatcggccctaacgcattgggcaggatatgagaaaaaataattttgtgcgtttttgttccaattgttttagcagcaagaacatattcccttgaacggagcgacaagaattctccccttactaatcgtgctgttgtggtccatcctgtgagacagaaaattaaaatcaatttgtccacacccggcttgaagatggtgaccagcgtgatcaacaagaaaatatcaggaatggataacacaatgtcaactacacgcataatgacagcatccactattcctctgaaatatccggctaatgctcctaaaaccgttccgatcaaaatcgaaccgactacggacgcaaatccaaccaataaagagacacgcgctccatataggatccggctgaaaatatcacgtccaaatttatccgttcccatcagatgttcaaggcccggcgccttatatttatcaagcaggctttgctgctcttggggataaggtgcaattaaaggggcgaaaacagcagacataataatgataaaaagaataacggcacctaaaatggccagtttgtttttcgagaatttttcccagaaaatctttgtcattgtttctggctttttcgaaatattttctttcagcctgatctccggcgagggagttgtttgcagctctgacatctctgtttccctccttttaatattcgatccgcggatcaacaatcgcgtaaaggatgtctgcaatgaggtttccgacaacgacaagaaccgccgagatcacagtcattgccatgataaccggataatcgcgctggaatgctgaatcgacaaacagctttcctaatcccggccaagtgaaaatttgttcgacaacgacagatccgccgataaatgaaggaatcatcaaaccgaaaattgtaatgacgggtaataatgcattcctcaatccatgtttaaatagcactctgttctctttaaatccttttgctctcgctgtgcgaatataatcttgatttaatacatcaagcatattggatctcgtgtatctcgtcagtccggccatgtcagctgtagctagaacgaatgcaggcagaattaaatgatgaatccggtcaaatatattgaattcggtattcagtgtctcgacacccccagttggaaaccagccgagatttaccgataacaccataatcaaaattaatccaaaccaaaagtttggaatagccaggcctataaacgaggtaaatgtaatgccatagtcgatttttgaatacggccgctttgccgacaggacaccgaacggaatagaaatcataagagccaaaatcgttgaaaccagcatcagcaggagcgtattgggtagtcttgccataatcaattctgaaacaggcgttccttttctgacaatagacgttccgaaatcaccctgcaccatgttgcctagccactttaaatattgaacgtactgaggatcattcagaccgtatttttcaataaactgctctctgtcagcctggctgattttcgggtccatcattaatgtcatcggatctccgggcgcggctttcatgataacaaatgataaaatcgtaattcccaataaaatcgggatagacattaaggttcttctgataatatatgcagccatatacttgtccccctttactttccttattaaaaacagaagagggagaaaacgctctccctcccctttaagggaaatttattttgcaagccaccatttttcaatattatacaaatcacgtttcggatgatatttgtatccttcaagattttccggcattgccatatggttgttaggataatacaagaacgtatacggctgatcttccgcaattttttgatagatttgctcatattcttttgaatactgctttctgtcactgattgattttgcatctttcatgagtttatccgcttcggcatttttataccaaacgtagttcaaaccctttttaatctggcttgaatggaaaatatcatattgatccgggaatgtggataaactccatcccatgaccattgcatcaaaatcccaattcggaggattcatttgttcaacgagagcgctccattcaacgatctgggttttcacttcaatgccgatttttttcagctgttcctgaacgacgacagcgatgtcttcacggactttgtttccttggttcgttttaagggtaaacgagaatttctttccgtctttatccagaatgccgtcaccgttcgtatctttccagccggcttctgcaagcatctgtttcgcttttttctcgttgtactcaaatttcggaacatctatatctttaggatagttccaagataaagggctttccggaatgtaagctacctcgccgtctccatctaatacttggctgacgattgactcgcggtcaagagcggttgttagcgcttgacgaacctttttatccttgaataattcatttttttcattccacccgatgtacacataacttaatgccaaatcagtaacgatttttaggttgttgaatttttcagccgttttgtagtcagtggcgggcacattaaagaaattaatatcgcctgcctgcagctgagcaacggcagcatttgcgtcaggaatgactttatacgtcacagtatctaaatacggtcttccttcaaagtaatcatcattcgcttcgagcttaatatattggccctgcttccattccttaaacttaaatggtcctgaaccgattggtttctttctgttaaactcattttcttctaaatcagcaatcggaacattaccgagaatatgtttcggcagaatagctgtgctgtctaacgcattgttgtagaaattaccgtctttatatttcagcttaaacaagacttcgtaatcgccttttttttctacggatttcagcatttcatatgttgaaccgcgttctcccttgtaatctttgcttaaagggacactgtacgtaaatacgacgtcgtctgcagtcagttcttttccgtcatgaaacttaacgccttttttaattttcacatcatatgcaaggccgccgtctaattctttaatgctttcagcgagtgacaatttcacatttagtttttcatccgttttcgttaaaaagctgtacagcatattttcaatatccgtacttgcgtcatcggtagaatacagagagttaaaaagtgtgggttctccgattgaaccaacaaccaaatccccgccttgctgcggtttgcctgctgattttttcgcgctgctgttgcttgattttgatcccgagcaggctgataaaaagatggccagaaccatcaatacacttagcatcatcagtgcggttttccgtcttttcattagatattccccctcttgaaatgttcgttcttctaggctgttgtttatgtagtgtgcataccccctctcaaagctgtgcgggcaacattagctataaaggtgacaagccacaaagtggctgggagcagcttctttaaattctggtatttgttccttgcatatcggttttgcaacaggacatcttgtgtggaatacgcagccttttggcgggttggccggactaggcagttctcccttcaggacaatgcgttcacgtttgacagaacctctttttcttgtaaccggaacggaggataaaagcgcttgggtatatgggtgaagcgggttgtcataaagctcatgcttgccggtcagttccatcattttgccaagatacattactccgactctgtcgctgatatggcggacgacactcagatcatgagagataaatagatacgtaagattaaattcttcctgtaattcctccatcaagttaatcacttgggcctgaatggatacatcaagtgcggaaaccggctcatctgcaatgatcagctctggattcaaagtgagtgctctggcaatgccgatccgctgacgctggccgcctgaaaactcatggggataacggccggcaaacgacgggtgaagccctactcttgcaagcagctcttcaactttttcgtttcgttcacgcatggtatacatgttgtgcgtattaaacggctcctttatgatggaacgcagggtctttctcgggtttaacgaagcaaatggatcttggaaaaccatttgaatatttttgcggacactcttccgcagcttctcctctgacagattggaaatatcctgccctttaaaaagaatttggccctctgtcggtttgtacagtctgatcatcgttctgccggcagtcgattttccgcagcccgactctccaacgattccgagtgtttctcctttttttaacgaaaatgaaacaccatccaccgcttttacatcaccgacttttctttgaaaaaggcctgaccggatcggaaagtatttttttacgtcacgaagctctaagattgtttcttgattagctgctgtcatgattgttcggcaccctcttcctcatataaaaagcatctcaccgttcttccgcttttgtgtgtcaaaagcgaaggctgatttgtccagcacttatccatagctttcgggcaccttggggcaaaacggcaccccggcggcagattatccggtgtaggcacactgcctttaatcgcatttaatttatcaatctctccatctataacaggaattgacgtaagcaggccttctgtatacggatgaagcggttctaaaaataagtcatcaacagtggcgttttctacgacttgtccgcagtacatgacaatcactctatcggcagcttcagacacgacacctaagtcgtgtgtgatgagaagaatcgatgtattgaacttctgacagagatctttcatgagctccagcacctgggcttgtattgtcacgtccagcgctgtcgttggttcatcagcaatgagcagtttaggattacagctcagtgcgatggcaatcatcaccctctgtctcataccgccggacagccgatgcgggtactccttcataatttgctccgcccgggagaaaccgaccatctgcaagagttcaacagctcgttgacgggcttcttttttcttcatgtttttatggtaaatcagcacttcggtaatttgttctccgattgttaacaccggattaagggaggtcattggttcctgaaagatcatggatacttcgttaccgcggattttgcaataatcgttttcagtgaatgaggtgaggtctttgtcttcgagtttaatagagccgtccatgatttttccgcctgagctttggacgaggcccataattgataaagaagtaatgctttttccggagcccgattcacctacaagcgcgacggtttcgcctttgctgatgtgaaaatcgactccgtcaaccgcagggatcggctcctttttcctgaaaaaataagtctttaaattattcacttctaaaagtgtgctcatgctagctcccctttcccccctcttgttgtcaaacgttttcaagagaaagcaatccctttattcagaaataataaataatattgaattatcgaaaaattttatagttgtatattattacaatcattttgcaaaatcaagaattttttaggataaatgtaatattattaatgaaattccattattttatccttttaaagcattgcatccaaaaaggtctcagcaggaatggacagcccgtctgcggtgcttgccttgctggcggttaaatatttttttacaatattgaatccaactgcgtatccaagcatttttggctgatatcctttgccgaataacagctggggaaataatcgattatcccgtttgatatcccgatggggcgcaatctttttttcatataaagcctgaagctgttccggtgtataccaagtcgtccattcagccgtttgacttcggccgaacctctcataaacagcatattccgccagcccttccatgatgattgtatcaagtaatgtgacatccttttcctcttttgtcagatgacctaaccggcaaacgtgatgatactcatgcgtcataagggcagataccgacccaaaatctaaatctgacgaaagaaaaaggaacattttgtcttgaaaggcgagtcctgattttgatccgaattctaaacggattctcctgtttcgttcatcaaccggcagcgtaacaattggtacatcaggaccttgccatttgtttttgaggtactgttcttccttttggatatgtccgtaaaaacctttttccttcagcttggaaaccgtctgaataccctcttttatgtttttaaacatcccatgatgctgaagatgccccagaatgcccttccagttctttttctccgcacctgaaaaaagcgggataatgtaatgcgccaaatcatctattgaaccggccttcctgagccagctatatgtttgttctacactcatgtgatcgcctcctcttttaatcctatgcacacaaaaaaaaccggctaccctttaagggcagccggtttggcttgattatgattgatattttttaaagattaatgttgcgttgtgtccgccgaatcctaatgagttgctgagaacataattaagttcctgtctgcgggcttcatcaggcacataatccaaatcacattcttcgtcaggtgtttgaatattgattgtcggcggaatcacgccttctttaatggccaggatagagaaaatggcttcaataccgccggctgctcctaagaggtggcctgtcatcgattttgtagagcttaccgcaagtttatgcgcatgctcgccaaaaacggtcttaatcgccattgtttcgtatttgtcgttgtaatacgtgcttgtcccgtgagcattgatgtaatcaatttcttcaggtgcaatgcctgcatctttaatggcttcttgcatcgctctcgctccgccttcaccgtcttgggccggcgctgtgatatgataagcgtctccggttgagccgtagccgacaatttctccgtaaattttagcgccgcgggccagggcatgctcaagttcttcaagaacgataatccctgcaccttcccccatgacaaagccatcacggtttttatcaaacgggcggctcgctgttttcggatctggattagtagacagcgctttgttggcactaaagccggcgaatgacattcttgtcagcggcgcttctgttccgcctgtgaccatcacgtctgcatcaccgcgctgaataaccttaaacgcgtcaccgatggagttcgttcctgtagcacatgctgtaaccgtacaagagttcaccccttttgctcctaatgcaatagaaatctggcctgtcgccatgtcaggaatcatcattggcacgaaaaacgggcttacccgtcttgggccttttgttaagaagatttcaaattgagactctagtgtttcaagtcctccgataccggagcctacccaaacaccgactctcggcgcgatctcatcggtaatgttaagatctgcatcttcaaccgccattttcgcagccacaaccgcatattgtgtaaagcggtccatttttctggcttcttttttatccatataatcttcaacattaaaatcttttaattcagcggcaacttttgccggatattcttcagcgtcaacacgagtgatcggaccgattccggacacaccgttgattgcgttattccaacttgtatcgacgtcgttgccaagtggagataatgctccaagtcctgtaacaactactctttttttagtcatcttgtgtgcacctcacctttttttatcggccccagcggattgcaatggcgccccatgttagtcctccgccgaaccctaccataacgaccacatcgccgtctttgattttaccggcttccaattcttctacaagagagatcggaatggatgcggcagaagtatttccatatttatgaacagttttagacatcttttcgacaggaagctctaaacgctcgcgagcagcttccatgatacggatgttcgcctgatgcggaatcaaaaagtcgacatcctcttttgaaagtccggctttttcaatgacatttacgcatgattctcccatttggcggactgcaaatttgaaaacttctcgtccattcatgattgtatgtcgtttttcattcagatacaagtgctgaccgcctgtgccgtcggctcctagttcaaatgaaaggattcctctgtcatcactgactggcccgactaccgcagcgcctgctccgtctccaaacagaacggctgtattgcggtcttcccagtcggtaatgcttgagagcttctctacaccaacaactagaacatgcttgtaggttccggattcaataaattgtttaccggttacaaccccgtacatgaagcccgcacaagccgcgctgatatccatagcacacgctttcttcgcgccgagttgttcttgaatcatacaagagaccgtagggaatgactgatcaggtgtaacagttgcaaccaagatcatatccagatcctcagcagccacttcagcttgttccagcgcatttttcgctgctgcaacagccatatgtgatgaaaacacatcatctgctgcgattcttctttcttctattcctgttcttgtacgaatccactcgtcagaagtttcaaccattttttcaagatcatgatttgttaaaaccttctcaggaatgtaacgtccaacaccaagtattccagctttcattagggaagactcctttatatcttaaatttagaagatcaatcaggttgtgatcaattattagtatcaggtactaattctatcctattttttttcacatggcaatatattcgtctaaactatcagttcatcttactcatagagtatggtatatggaaaggaggcgtatgcagttggatgtgttttcaagaatgatgttcggcgatgcagcaaaaccaacagaagagaaggaggaggaacagcaagaggaagtttctcaggtttctcagacaaacgacgaagagacgattaattacatgcatattatggaccaaatcggttcaattatgaactctcttgatcaaatcaagcccgctttaaaggagcttgcgcccatgctctccgctattaaaaagaaaatcatgtgaaaagccactttcaaaaaagtggcttcttcttattctgtttcagatttagcgtcagacttgccaagctcataagcttccgccattaccgttgtaaatagattcataaacggctggatggcctccattgagagctcaatgcctgatttctcaagctgttctttcgcttcagggagatatttcatggcaatttgcaagaattcaagtgatttttcgtgctgcatgtgacgtcactccattactcgttttttggcagctcgcctgttttgttgtatgttttgatcagcttggcgattctttgctgaaagtcttgatcgacgagcgggctgaatgttcccatctcaacgactcccgtgttcaggtcgtagtaatgatcgccgccctcaagggtgcctttattaaattgttcagcaatgatttcataggccttgtccacattttgcaccgtgctggttaatacggtattctcgcccagatccgattgatctgtgacgtagcctatggcataaagaccgtcttttttgatttgctgaataacaggaacattatacccgtctccggcgggatacacaacatccgcgccttcgttcttcattttctgataaagctttactgctgttgtatcatcatcccaatgatccgtatatttcgtatttacctctatatccggattttcatacttggcccctttgataaaaccgtcaacctcaggctgccacgtaaaggaagcaattacaccgacctgattcgttttcgacatatgggcagcagtcattcctccaaaaaagcccattgcttccccgctaaaatggacacttgttacattatcagctttcgctttcgcattggaaatgacgaattccatatctggataatcttcgccgaccaagttaaacacctcagcatattcactcccatggccgtagagcagattgacgcccctcttatgaaaatcctcaatcgcatttatgatatcttcttctgttttaacgccttctttataatagacgtccacattgtatttggattgtatattcagtaatcctttatacccttttgtgccccatacgaggtcattaatcgtatcaggaaagagcatgccgaccttctcaatttttcctttgaacggagtttgtccacatccactcaataaaaggaggacagaaaagatcatgacaagccttgtgatcaagtcatgttcaactccttttgacaagctataacatgtattatttttatacgtttattgtatctagaaaactcgaaacatggaaggtttttcttaatatttgtcgaaaattgatgaaaattgtcttttccactcgataatttttgtttttgcttcttcttttgaggttttctctgtgacttgcaattcaaaaagctgatctttgctatgacggcttggttctaacaggaatctcagcaactcgtcagccacgtcgtttgtgtaatagccgtcttcctctgtttcttctttccatggcccgtacattttcggcaggatcacggttttttccgagcctgttttttcacgtttatcccattcttttcggtcttcttcatatactaaaatataaggagaatcatattggtctaaaggcaaaaaacttccgaactggatacaaattgtatcataattttggtctccaatgtgttcaagctggcgaaagagttcatttctcccaagccacatgagtctttcttctaagtacatttgtctcattttatcttctgtttccgccagaacaacgtcaacatgtatgccttcatccatcattcgctcacataatgaaaggccgaaaaattcgtccgcacctacaatcagcgttgattccattgcatctgccgcccttccggtttttcatttcccaaaacaaaacagcctccgcaaaagagaaggctgttgtcattatattctctataattctttttcatgactatgaaagaatttgcaaattgatgcataaattctgcttggatgctcaaataaatgaaatgtcatgtcgaccggtgagccttgcttttgctgtttttccttgaaaacttccgcatgtacgctgtagggatatggagctccggtcatacgctgccatatatgaaccggtacgccgctcgggtagctttgaattgttttataacgaatcgcttccgcttctttttcagaaattccgtagcttttcgatacttctttcaaaaattgcttatagaaaaatttattttctttttccgattcataatgtgcctgaagatcgagacaaggattcaacattgcggctgagcggatatgatccggggaaaaacgaagcagttcatcggccacgagagcacccatgccttctgctaaaatatgaatcttcggattgaggatttcctgcttcagcacagaatgtatcagctgtttggcataggtgactgctttttccgccccccaatgccttccgaacagattgctgttaaaaagagtgtatccttcattcatcaacatgctcagaagctgatttctgccataatgctgctgccaaaagcttgaatcatgtccgacaaagtgggttctgtcccccaagataaagatgccgaagccgttcgggcgatagggcagatgaatgacattatgctccgttcccagttgaaagtatctttccgttattcccatcgcttgcccgcctcctttcacacttcatctcacgctatcttatgtaaatagaaaagaaacgaataaggtaaagtcctagccttttacatttttggctattatactgattgacgttttatattttaccattaaagtgtgacgaatcagactcttttgtcacctcactttctgctaaaattggattcccccttcgctttttgtatggtatgataacttttagaatagaatgagaaggacgaggtggaaacgtgcgatatattattgcctttatttggacgttccttttatcacatatggcatgctacttggttgcaagcatgaacagcgttacgtataatttcaaaacatcatctgtcattgctgttgtactgtatgtcttaatcatggttttagcagaaatcatgcctatgaacaaaaatgcaagccagcattaaaaagccaaaaacccaaaacatttattgttttgggttttttagtggtcacggctttcttttgtaggtccacagccggttgtggtttgatgtttcggggaacatttcccctgctgacagatggaccttttgagggtttttaaccatgctccctgtctcgccgatttctacgtagacaccgttattaggcgctttctgtccgggccggaattggtgctgctgtcccactgtttttcctccttttcctttttgctgtagtatgcgcctaagcggctgtgaatatgttgccatcaaaaaaactgctgagtttggctcagcagttttttgatgattcccctttatataaaatggccttcagcagtgctttttgcacatgaagacggttttccgcctgctggaacactgcagagttcggcccgtcaataatctccgcagtcacttcttcctcgcgatgcgcagggagacaatgtaaaaatgtatagtcaggcttggcatggctgaccagcgccgcattcacctgataaggcgcaaagacagcaagacgttcttgctcttccgcttcctgccccatgcttgtaaacacatcagaataaatcacgtccgcgtcttttacagcttcaatcggatcatctgtcagcgtgacagaagagccggattgaagtgcatatgtctttgccgcttcagctgcttcatctaacacttcatatccctttggtgaagcgatcgagatatcacagcccattttcgcgcagccgatcatcaaggagtgcgccacgttatttccgtcaccgatgtacgcgacttttacgcctttaagcttcccttttatctccttaatcgtcaagagatccgccagcgcctggcatgggtggtatttatcggtaagtccattgatcaccggaatgtcagcttctttggcaagttcctccaccttttcatgttcaaaggtccggatcatgatggcatccacatagcctgacagcacttttgccgtatcagcgacagtctcaccgcgccccagctgcagatctttctggcttagaaagagggcgctcccgcccagctgcgccatgcccgcttcaaatgaaacacgggtccgcgttgatgatttttcaaaaatcatcgccaaggttttgccatggaatataggctgaattttgttttgtttcagctcaccggcttctgcgagcaaggcgtttatatcttcttcactaaggtcctttaacgttaataaatcttttccgtataaactggtttgcgtcactgtgtgcatgatgccacttcctttttatagaggtctttgagagatacaggctgcggatggcctgaaccgctttgtaaaaacgcccgcacagtttcttcttctgtaaagacggggatgccgtgcgtcatggcttccaaacgttctttgcgtgcttcttcagaaccgctcagattaatgtggagcgagtttccttcctgttccatccatgaggcaaatgttccttcatgtattgtaaaacctgcgttttctgctaactccttcacatcttccggaacgttttgcaaataaatgcttcctttttgactccagactcttgtatagatttttttcaaggcgctgttagaatcatatgcgacacacatgccttctcccgttgatttcatttccggtccaagcttgacatccacatcctggatcgcatgagaagaaaaaacagggaacttcacggcaactccatgatgattttgaactgccggatttagatcttttaaggacgctcccgccagcagacgtgtggcgagcggaatcatcggaacgcccattactttgctgacgacaggaaccgtgcggctcgctctcggattcacttcaagaacgagtatgtttccattgtcgatcacaaattgaatgttcatgatgcctttaaatgaaagttttcgggcaattttttgtgccgcatctttcatgccctgctgcagcccgctcgtgatggacggtccgggaagaatggcaaaactgtcccctgaatggacacctgcccgttcaatatgctcggtatatgtcgggataaagacttcctcgccgtcggaaatcaaatcaatttcgacttcctttccagacacatactgatcaattaaaatcgggtatggcatgctgtcctcatcattcagcagctgagaaagctgggcttgcgagtcaacaatgatcatgcccattccgccgataacgtaagatgggcggattaacaccggatagccgatctcactcgcttttgaagcggcttcttcttttgtataagcaatttctccttttgcgtgcttcaatcccagctcgtcaagaagctgataaaattgatcccgatcctctaacacgtcgagcgtttgaaatgatgtgccaagaagagtaatgccggctttttcgagcgcttcagcagcattgattgcagtttgaccgccaaattgcacaattgcaaaatcaatattttcctgctccgccacgtttacaatatgctccgttgtcatcggttcaaaatacaggcggtccgcaatttcataatcggtgctgacagtttccgggttattgttaatcatgatggtttcgaacccaagctcttgcagtgtcagcacaccgtgaacagcactgtaatcaaattcaacgccttggccgatccgaatcgggcctgatccgataatgagcgcgcgttttttctctttgcggctgatgtctccatcggtctctccgaaatatgtggagtaaaaatagtttgttttcgcatcaaactctgccgcgcatgtatctacgattttaaaggaaggcgtaatgcccatctccttgcgaagcgcgcgcacctcttcttctgttttgctgatcagcgaggcaatcgttgcgtctgagaatcccttttcctttgctttcttcaataattcaaaagagagatcgctccctgcttccatcaggcggttttccaatttgatgatgttgtcaaaggtatgaaggaaaaacggatcaatttttgttttttcatggatgtcatcaatcgagacgctgcggctcaacagctccatgacaacgaaaaatctgcggtcatccggagtgattgccaaatcccatagcgtatcaattgacaacccgctgagctctggaaggtgtgtcccgatattttttaattcaagcgacgcggctgccttttgtatcgccgcttctaaattccgttcaatcgccatcacttcaccggtggctttcatttttgtgccaagcttgcggtctgcgtttttgaatttatcaaacggccagcgcggaaatttgacgatcacataatccagtgccggttcaaagcttgcgtaagtcgagcctgtgagcggatttttcagctcgtcaagagtgtatccgactgccagtttcgcggccatcttcgcaatcggataaccggtcgctttagatgcgagagccgatgaccggcttacacgcggattcacttcaatgacgtaatattgcttgctgaatggatcaagcgcgaattgaatgttgcagccgcctacaacatcaagtgctgagatgatcgtcagacttgctgtccgcagcatttgatagtcttcgtctgtcaatgtttgtgacggcgccacaacgatagagtcacctgtatgcacgccgaccggatcgatattttccatattgcagacggtaatgcatgtgttattgctgtcacgcatgacttcatattcaatttctttaaagccggcaatgcttttttcgacaaggcattgattgatcgggcttgctaatagcgcctgcttaatcatagctgtaaaggcttctttatcaggggcgattcctccgccctttccgcctaatgtgtaagctggtctgataataacaggaaaaccgatggattccgcaaaatggagggcatcggcctcgttatcaacaatttcactctccggcacaggctgttttaattcattcattaacgaacggaatttttcccggtcctctcctttttgtatcgtttcaacggatgtgccgaggagtttgacgccgtgctcttttaaaacacccgtttcttcaagctccaccgctaaattcaacgcggtctgaccgcctaaattggcaagaagcccatcaggccgttctttcttaatgatggctgtcaggctttctgctgtcagaggctcaaaataaatttcatcagcgaaggcttcatcagtcataattgtcgccggattgctgttgacgagaattacccggtagccctcctccttcagcgcgatgcacccttgagtgcctgaataatcaaattctgccgcctgcccgatgatgatcgggcctgagccaattactaatatgcttgaaatactggtgtctttaggcatgcgcgatttctctccttgctggtatcacattctttagataatcatcaaaaatccattcgctttccgcaggtccgggatgggcttccgggtggaattgaacactcatgacaggcagttttttatgggcaagcccttcaactgacgtatcattgacatgatgaaacctgatggtgagctcttcttcattaatcgactgttcatcaaccacatagctgtggttttggcttgtcataaagacccgtttcgtcttacggtcgatgaccggatgattagctcccctgtgcccgaatggcagcttaaaagtattccctccaaacgcgagcgcgatcagctgatgtccgagacaaatgcctagagtcggaaagcggctgatgatgcttttgatctttcctaaatatggctgaatggctttcggatctccaggtccgttcgatagcacaattccatcgggtttgatgttgtatacggcctccatttgctggtatggcaccacggtaaccttgcagcctcgtttgacaagtgatgatgcgattgactttttatagccaaaatcaatgagagcgatatgtttattcccgtcgccgaatgtgctgatttcctgggcggaagcctgctctgccacattctctggttgaagggcaatctcagctccttctttagaggctgtgactgtcgcacccatcgtcccgtttgcccggattttcttcacgacagccctcgtatcaacatgggttaacagcggaatattccatttctgtagatactccttgaggctgtataccgcttcataatgagaaaagtgatcacacgcctcatagacaaccgcggcttttacttgcggtttcttgctttcaaaatccttttcatttatgccgtagttgccaatcagcgggtaggtaaatacaataatctgtcccttatatgatggatctgtcagcacttcctggtagcctgtcattcctgtgaaaaaaacagcttctcccgtgcagttttcatgaccgtccagctcgccgctgaacgatgtcccatcttctaacactaaataaccttccatctaacagcccacctcttgatgaataattaattataaaaatgaatttttatgcctttatatcgaaaaaaaatcactggtttacagcggaatgatgagcgattgcctgtttcagcttgctgacggcttctgctatttcatccttagtcacggtgagcggcggcagcagccgaatcacgttcgggccggccggcaatacaagcaagcctaatgtctgcaattcagcaataatgtcagcaaccgggccatcacactcaattccaagcattaatcctttacctcggatttgtttaacaaaagggctctttagctctgcctcaagctgttcttttaaaaacgcccctttgtcagcagcctcttgcaaaaagtcaggctggaatacaatttgcaatgtggcattcacagcagccatcgccagcatgtttcctccgaaagtcgttccgtgagaaccaggggtaaacgcttctccaagctgtttctttccgatgacagcgccgaccggaaagccgtttcccaatcctttggcgactgtgatgatatccggtgagagtccgaagtgctcatatgcgaagccttttcccgtccgtccgatgccggtctggatttcatcaataatgagaagggcttgcttttccttgcaaaacgactgtacggctgataaaaattcagcactcgccggattgactcctccttctccctgcactgtttcaagcatcaccgcggcaatatcgccttcctccccaagagctttaaaagcagaaggatcattgtatggcaggtagtgaaagcctccaagcatcgggccgaagcctgttttgattttatcctgtccggtcgcagccatccctgcatacgtgcggccatggaacgactgaagaaaagtgatgatttttgtttttccagttgcttttctggcaagctttatcgcaccttcattcgcctccgcgccgctgttgcagaaaaagacaagatctcccgcactatgcgctgccagcttctgcgccgcttgctcttggagactgttttgaaacaggttggatacgtgccatacgctgtcaagctgttttttgactgcctctgtcaccgcttcatggcagtgtcctagatttgataccgcaatcccctgaatgaaatcaaggtacgttttgccgttttgatcctcaacgtacgttccctttgcttttttgatgtcaatatcccaacggccgtaggtttgaaacaagctgctcatgaaacagcctcctttgctttgacaatttttgtcccttgaaaggtttgttctgcgaagaatgatcctttaccgtttacgatcatgacttcagacacctgatctgataaagctgacaaggctgaattgaccttcgggatcatccctcctgtgatcacttcctgcttgatcagcatctgaatctccttaggggtcaggacgtccagacgctgcttttccttcatgattccatcgacatccgtgacgaacatcagcttatcggcttcaagcgctccggcgactgctgaagcagccagatcagcatttacattcagcgttttgcagtcgcttgtcatagacagcggcgcaataacggggatgatgccattttccatcagcgcgttcaccatggacgcatcgacttttttgatttctcccacttctccgtatgtttccggatctagataatcagcctccaaaagaccgccatccttaccagaaatgcccgcggctcgcagtccgtgtttggcaagctcagcaacgaaaaatttattgacagaaccggataaaaccatttccgccacttccagcaccggcttcgttgttttcctctgtccgcccgaaaactctgtcttgatatttaaccgtttcagcatatttgtgatttccggtcccccgccatgtacgattgccagcttccagcctgacgccctcagctctttcagattttgataaaattcctccgacagctcacggatgacgcttcccccgcatttaaaaacgattgttttcttcatttcgctcccctttattacgtgcgatagctcgcgttaattttgatatagtcataggtcaggtcacagccccacgctctcccgtttccgtccccttcagccatcttgatgacaatggtgatttcatctccttcaaggtattccttggcgatagattcagagaatggctgaggttcgttattcttaaacaggcattggccgccaagataaacctctacttcttctgccgtcacctgtgctgcggagtgtccgatggctccgatgatccgcccccagttggcatctgttccgtatactgccgtttttacaagatttgagccgacaatctttttggcaatgacgtttgcatcaagattgtttttcgctccctgtacttgggcttcaattagttttgtcgcgccttctccgtctctggcaatctctttagctagatcctcacaagtgagcaagagcgcttttttaaagaccggccagtctggatggtcttctgtcaggcactcgttttcggcgcagccattcgccataactaataccatgtcgttcgtggatgtttctccgtcaactgtgatttggttaaatgaaacgtcagtgatttcccgaagcgccttttgcagcgctttttcttcgattgccgcgtcagttgtcacaaatcccagcatcgtggccatgttcgggtgtatcatcccagagcctttggccgctccgccgatcgtgactgttttgccgccgattgccagttcatagcacgtctgcttgatcaccgtatcagttgttaaaatcgcttcctcaaaatcgcctgatcccgcaggtgtttctttcagcagttcgatccccgcgtggattttttccatgtctaaatgctcgccgatgacacccgttgatgaaacagcgacaagctccggctcaatgccaagctgtgaagcaaagctctcccgcattgtgtatgcgtcctttaagccctgttctcccgtgcaggcgttggcaatggcgctgttgacgatgacggctttcagtgtcggtccgtgctttaagctgtcttgtgtcactttgatcggagcagcctgaaagtggctttgggtataaactgctgcactcacggccggtgtctcgctgataatgacgccgaggtcttttttcgagtagcgcagtccgcaatgcacaccctttgcctgaaacccttttggcgaggatacatcacctgttacttttacaatttgatcttcacttaactgaatcatggttcgattctctcccgttctatggataaattggcgtgatggtgagtccagtttcttcattccagccattcatcaaattaaagttttgcactgcctgaccggcggcacccttcattaaattatcgattaccgagacgatcgtgactctgttcgttctctcatcgagggtcacggcgatatcacagaaattgctgccgtacacttctttcgtttgcgggtactgaccttttggcctcactctcacaaaatatgaatcttggtaaaattccgaatataaatcatgcaggtcatctgcggttaggtcacaggttaatctggtatacatcgtcgccatgatgccccttgtcatcggaaccaagtgagccgaaaatgtaatgggcccgagacctggctgccattcattcagcgcctgctcaatttccggcgtgtgctgatgttcattgactttataaattttaaaattgtcgttcagctcagaaaaatgagttcccatggatgcttttcttcccgctccggaaacaccggtcttcgcgtcaacgataacgaaagattcatcgagcagtttcttttgagccaatggcgcgaggccaagcaaaacagctgttggaaaacagcctggattggcaatgagtttcgcctgttgaatttgcagttgattcagttctgccagaccgtataccgcctcttgaatcaccgccttcggtgccgctgtccgtttataccatttttcatattcagccggttcttttatcctcagatcacctgacagatcaataaccgtaattcccgcgtctgccagctttggagtcaattcacttgatactccgggcggcgcagcgagaaacatgatatctatttcgtgtttgatcgtattcatatcaatcggcttcagctgctgatccgctaagccggtaagatgaggataaccctcgctatagacattcccttctccgctggatgaataaagtatgcattcctctgcatgaggatgatgcgaaagaatcctgacaagttcggtgcctccatatcctgtagcacctacaattcctattttcaaaacaagttcaccctcttggtctttgtgaaattatttaacattataacatgaataaaaattaattcaatcgtatatttaatatttttattcatttataaattttctgttcaatgggaattccgctcaaaaaaaatcagcacgactccagcacaaaaacgttgatgcggtgccgcatttcagccgcataaaaaaacaggctgaccgcgtcagcctgttttcatcatcatcaatccactcaaaaaatatagaatagagcttgcataaaaaatcatttgcactgtgaaaaagtcagcgagaaagcccccgagcataatggctgctgctgaaaagacagctgtccaaaaatggtaattcccgatcttctttccacgctctccactgtctgtaaaattagcgatcagcactttttctccatgcttttgcatcgctccaaagagccctaacagcacttggacgatatacacttgaacgacgcttccgatatgcgggacatataaaagcagaacagccatcccccacgagttcagaagcagaaaataacggctgtcaaacctttcagacagccgtccgaggagcgggtaaataagcgctccgctcaacccgaacaatccgtaggaaaaaccgaactgtgtgtagcttgagccgatatttttcacaaacagaatataaaacggaaagattaagctgcttgcgaaaaacacgctgctttgtgataatgtcagccattttaatttgtttttccccattatttatacctctgataaaagtaattcataaagcgctcatccgggtcataggttcgttttttctgaaaaaacgcttcacttttcggatatgcctgtctcatttgcgcttttgtctggtaggtcatataaggcagataatagctgccgccgtgcttgatggcaacgtctgtcatgcgcctgatgattcgggcggtatctgcctggtcttcttttgaaaagccctcgtttattaatagtacgagcgaaaacatatcgtccttcgcataggaaaggtcggccttttcatttttctgcacgtagcggatcgtaatgttcagcaggttcagatcttcgtccgacagcgtttgtctcaggtcatcaatataggacccatactccttcacgggcacaaagtattcttgcaaaacatctgtgttgtcattgttttcatactcaagaaactttgattcggaccgcatgacgttattgcgtgaaatctctgtgccgttctggctcaggaaataggattgctgtgtgtcccacagccaattcctcccccattcataccgtcttgacaagccgagtgcaaactttgtggctcccgtatactcgtcttctttaagttcgctgtatgaggacagctgatcctgatgattagccaatacgtaattcgtgacatacatgtctttcagaaatccttttttcgctgttgaaattcgcgccagatgcattcggacatctggatttccttttacatgctttgaaaaatagtctgagtatgtgctgtaattcattttttctgtcttcatgacatacagctcatcatctgtcagctcaagcgttacatcaagaatcacgccaaaaaggccgtaccctccgatgaccgccgtaaacaaatcatcttttggagtgacagtgataatcatcccgtcagcttttaaaagccggaatgatttgactgtatcaattagcgagccgtagcgaatatcacgtccgtgtgcatttgcgctgagagatccgccgattgtaaaaatgttttgtgactgcatgacttttaccgcgagtccgtatggattcacgtatttctggatatcattccacgttgcaccgctttgcaccctgatggttttcttctcttgatcgagtgacaggattttgttgtagcccgtcatgtcgagaacgatgccgtcctcataatatgtatggccgcccatggagtgctgggccccggcgattgaaatttttatgttttttcgatttgcctctttgactgtgtcaatgagcatttcctcttcctgccctttcactgtctgctttatttttacaggcatcaggcggctgacatccgtcatctcgcttgtggctgttttttgctctgagttcacagagtacgcaaacagggccgcatacgcgccagtacaaagcgcgaatgcaagcaatttctttttcatagtgctctccctgctgtttttatgaccattataccatgactgcgtcctcatttttccaaattatcttcttgcccgtttttcggcacggcggtcggcgacgataaagcaggcgtgaatcgcgcccggcagccaaaagatacaggtcaatatgagattcagcaaggcctgaaacggttttcccgaaaacaaaacagcaagcggcgggcataaaactgccagcaggtacatcatttcctttcactcctttcagctgtaaaaaaggacagcctcacatgtcaggctgtccttttttgttttattgaatgccaagcgcaatttttgcgtatctggacattttatccctagtccaaggcggattccatacaatgtgaacctctgtgtctttcacttcaggaaggtccgctaatgcttttttcacctcatccacgataatcggcgctaaagggcatcccattgatgttagcgtcatggtgatgtgcgtcaagccatcttcatccatatcaacgtcatataccaagccgaggttcacgatatcaacgccaagctcaggatcgacaacctgttccagggcgcccatgatgttttcttttaatgcttcttccacgttccctcactccttttttctacagtataacgtaaattcagctcttgttaataacttagtgctttataagtacgtttcaaaccattcaatcgtttttaacacagctgcccgcgggactttatggtcagcgttttcatctccgataaattgcaggcgttccggctgctcgctgtaatgggatttaatcgtgtcataaaatttccgggtcggcgcgtaaggcacaactttatcttttgcgccgtgccaaaataaaagcgggcgctgttgcagtttctccggctgaaggctgagatcccgcaactcgagacgtttcatcagctgctgtaccttctcttccggcacatcgatttcaatgccctgagattgaatatggtcaatctgctgctgaaacagctccacgtaattcgggcttcccatcaggctgacgccggcttttatccaatcatatgcagtcaaagcgccaagcgttgtgatgccgcccattgacgtgcctgcgagaccgatgcggccgccgtctatcaggccctctttttcaaaatggtttttaagtacgccgatctcttcaatctcgttgaggacgatatcccaaaaatgccccgccagctcttcaacagccatttcttctccccgttccccatggtgcaaagcctccggcagaacggctctaaaacccttctccgcaagcagataagcaatatgaaggttgtgttccttcgcgcttgtaaaaccatgtataaagatcacgagaggaacagcgcggtgcctgttctcttcctttacaatatgtaaaaacggaataccggaaacggtttgattctcaatttgtatcacaatgtgcccctccttaggataaccataatcataagtgtaacatgtagacaataaagatggtaaaaagctacactgtaagtaaggcaaaacaagcaaaatctaaggttaaaggagcttttcatggagacaaaaccctatttaatcgcattagatttagatggaacattattaaaggatgataaaaccatatctgaaaacacccttcatacgatacagcgcctaaaagatgacgggcattatgtctgcatctcaacaggccgtccgtatcgttcaagttccatgtactaccagcagatggagctgacaacgccaattgtcaattttaacggagcatttgtccatcatccgcaagacgacagctggggacggtatcatacgtcactgccgcttgatgttgtcaaacagctcgtggatatcagcgagagctacaacgtacataacgtgcttgctgaagtgattgacgacgtatactttcattaccatgatgagcacctgatagatgcctttaacatgaacacaacaaatgtaacggtcggagacttgcgggaaaatctcggtgaagatgtgacgtccgtactcatacatgcaaaggaagaggatgtgccggcaatacgctcatatttatcggatgtgcatgccgaggtgatcgaccatagaagatgggccgctccttggcatgtcattgaaattatcaaaagcggcatgaataaagcggtcggcctgcagaaaatcagcgattattacggcgtgccgagggagcggatcattgcttttggagatgaggataacgatttggaaatgcttgaatttgcaggctgcggcgttgcaatgggaaatggaattgacgcggtcaagcagattgccaaccgaactacggccacaaatgaagaggacggcgtggcaaggtttttgaaagaatatttctcactttaaagaaggtccgtattaatttttcccactcataaaccttactttaccccaccatactattgaagacgactcatctcgtcaaagtatggaagggggcagtctcaaaatgggtaaacgaagcaaatccagaaggtttattcagcagggtaaagactccatcgggctacacgccgcaagatttccatatcggtctactttagaagaagctcaccagcatgccgcggcacgagactcggctgaaaggcagtatgaatattaaatgagaaatgaactgtttcagcaggcaaaatcatttgttcaacaggcggtcatggtgacaaacggctttgaggaaggcgatcaggagcaagcgattctgagagccaaaaatgctgtatcttctgcgtatgccaattcgacagatgcggaacgtcaacagttgcatcaatttcaaaatcagctggacaaactgcaataaaaaaaggctatggcgactcgccatagcctcttatttgacttcaaactgctgaacagcctgaacctgcttgagattttccgccctgcccttaaatgtcacctttacctcataggttccgggctcagggacttccttccacacatcagagaaatcatatgtttctccagattcaagcgtcaggttttgaaaagcctgcgtaaacattttttctttcgaataacggtatctttctttgtgctcagaatcatacacgacaagttcaaatttttgccctgtgctgaattgaaactcaatagcacgttcgctttggttcttcagcgacatgttaaacttgatttgttcaggctcctgaattgcgtcaatagataaaacaacctcttgattctccattccgcctgatacctccttatcgggttctgtctgctcatctttcccgcagcctatcaaaagcagcacggggaggagcatcacaagcagccgtttcacgacttccacctgctttcgtcagtcttttctaaagaaaccaaaaatccctgtcgtttgaacgatgttcgtaaatgcttttggatcaacttctttgacgatcttttctaaatcgtacagttcatacctcgtgatgacgataatcatcatttctttctgttcgttcgtaaatgctccttttgccggaacagttgtgatgccgcgcaccatttttccgtaaatggcttccttgatttcgtccgcttttttcgtcacaatcattgccgtaagcttcatgtggcgagtgtgaatggcgtcgatcaccctcgttgtcacatatagtgtaaccagggtatataatgctttctcccaaccttgcaataatcctgccgtcaagatgataatcccgttcagaatgaagaaatacgtgccgacgggtttatccttccactttgcaagtaccatggcgacgatatcaagcccgcctgtcgaagctccgtattttaatgttaagccgataccgactgcggaaatgacgccgccgaacaccgcgttcagcaaaatgtcatgtgacaggcttgtttccggcaggatccccataaacagagtagtgagtgcgacacttaaaatgctgtacactgtaaacgatttgccgaccttcagccatcctaaaataccgaccggaatgtttaagaggaacaagagcgttcccgtcgatatgtaaaagggggcatattgatcaacgacgcttgataaaagctgggcaacacctgtaaatccgctggcatatacatctgcaggtatcaaaaataagttcagcccggcagcattgagtaaagcgccgatgatgacgatgagtaatttttttgtttgatctagtaccatggcatgttcctccgctctttcttctttattatgttttcccttaaaacaaatatttgaacacgattttggcaaattaatatgatatagttggcttaactctcatgataacgagcgataacggaaagaagggaagcaatatgacagttcatctcatcgctgacagcgccactgatttgcctcgttcttattttgaagaaaaaggcattggctttattccgctcagggtttctctcggcgataaagaattcgaagatgcagtcacaattcatgcggatcaaatatttgaagcgatgcaaaatggagaaacgcctaagacgtcccaagcctcaccgcaaacgattaaaaatgtgtttttgcaatatgccgaaacaggtgatcccgctctttacattgccttttcctcaggtctctccggcacgtatcagacagctgtaatgatcgccaatgaagtgaaggaggaattccccgatttcgatttgcgggtcattgattccaaatgcgcttcattaggatacggtctggctgtccggcatgctgccgatctctgtatcaacgggaatacaatacaagaaattgaaacgtctgtaaagaacttttgcagccagcttgaacacatttttaccgttgatgatttaacatatctcgcgaggggcggccggatatccaaaacgtccgcttttgtcggcggcctgttgaatattaaaccgctgcttcagatggaggacggcaagcttgtgcctctggaaaaaattcgcggacagaagaaacttttcaaacggatcatcgagcttatgaaagagcgcggggatgattggagcaatcaaaccgtcgggattagctacgccgcgaacaaagaaaaagccacggatatgaaacacctgattgaggaagcgttcaagccgaaagaaatcattatgcatccaatcagttcagccatcggctcgcatgccggtccaggtacattggcgatattctttttaagaaaatgagcaaacaaaaacagtcagactctgtgtcctgactgtttttgtttgctcatagaatgccgacagcctcatacgccttttcgactgaagctgattgcttcgagccttcaccgtataaatcattggcagcttcaatcgccgcttgcttcatcatgctgaaatctgtagatgccgttacataatatgttaaagcccgatagtaaatttgttcacttgcttcacgcccaatcccttcaacctgtacaccgtggtgcacgcctccttctgcaagaagataagctgctttattgtgaatggacgaattgatatggactccgccataatcctctgttcctgtgtagcggttcgagtaatgatctggatttccctgcttagatgggtcctccaatgaccgcaatgaatctcctgcaataccaggagtatagacatcttcgccgatctcccaatcatcacggtcagccatcgcgcccataatgtcagaaatggactcatttaatgcaccgggttctccttgatataaaagaccggcggaatactgtgtgactgcgtgtgtgatttcatgcgcgacaatgtcgagcgatccagacagcggcttaaatttcgaaccgtctccatccccgtataccatctggacaccgttccacgcagcattgttccattgtttgccgacatgcacggtagacgtaatccttgctccgttttgatcaaaagaatcacggccaaatgtcttgctgtaataatcgtaaacggcttgcgcatttgcgtgtgcgtctacagccgcaggttcattaaatacggacgtgccgctgactatttctttgcccgtatacccgatcagttgagacaaaagcgtaaacaaggtttcgttcaggttcttcgcgtcaaatgtattgatcccttttccccttgtttcgtcagccaaataaaagcgcccattttgttctgtgacgtcaaagcttttttcatcacctgacacgccgattcctgtacctgccgcttcatgaatggcattaaaggactcgatgacctttccgtttttggcatcgatgaaataatgccaatagccaggctcaggttcagatgtcgagagtctcacaaggtaggcgagatcatattcaccgtcgtgtggatagatatataattcgccttttggttccccatcaagatattcgatttttccaatggaagcctcgagctcacgccttgctgtatgtattgcttttttctcagaaatagacggtgtgacggagacgtccttgatttgcggatgcacctttccaaagaaacttttcacttgtttgttttccttcatcgcgaccgcttgttcaaagccgtaaatcggaattcctttgtaaacctccgttaatttaaaaaacgtttgttttgtctttggatcctttatggttttcgaaacgcgaaaatggctgttcgcattccctttgagcttaaactgcgtttgatgcttgtcaagataggaaaatagcgattctttctgggttgtgttttgtaccggcttctgcggtgacttttcgatgatgtatgaaggggtttgatacgtatggtcgtattcgatgctttcttcagctgaggcatgtgttacaaaaaccatttgggccgctgtgcataagccggccagtaatagagatgtcttggtcaagttgcgcaaaacaccacatccttcctattttggaatctaccatttttcttcatcctatcaaaaatacaaaaacttgtatgtggtgcttcgttcttattttcccaaaaaagaagggcagagatatttcgctctgcccttctttttctactctactaattttttattgacataaataataacccctgctccatatgccagtataagcggaggtatgagctgctcctgaccttgaaatgagataaaactattcagcaaaatgaacaaaccggaattcaagaaaaagtagcctgctattctggccagccgatctttatcccgtatacgcgcctcgttaaacccagccaacatccaggtttgttttttgattccgacaaaataggcaaccacaaagaataaaagcgcgatgacaattaatagataattgatgctgatttccatcttacagcctcctacaagattacttgatgttaagaaaaagaaaaaaagcggcgcagcttactgcaatcagcagcaggacgacaagcgcattgaggaacgggctcaaaaggagcaccactgctaaaaacagcagataaaccgcaccgactcgcgaaatcttgacaatctccttttgagagcgcattttgttttttctgacacctgcaaacatcaccaattttttccgcttccatacatatccggcgagcaccattaaataaacagccagcggcagatgtctgaagtcggacggcagcagcggcagggcgataatcgtgacaatgagaaggaccgaaatccagcttttgcccaataaagacctcctccttttcgtctctcccccatcacccatcatcaattcggcaagctccttcggatgagaaaattcagattcaacagcttcctgcagttcctcttcactaaggccggctttgattctgtcttgaacgaaagcggtgatatgcccctttaattcgtcgatagcgttttctctctctacatcaggcatattcgccagctctgcatttagttcctccatgtatcggtcaatgataagctgtccattcatagcaaatcccccgataaagacagtaaggcttgatgggtttccaggtatttctccagccgttcttttaacatttcttctcctttttgcgtcattttgtaatactttcttttcgggccgtccagtgaatcttcccaaaaaaattcgatccatcccttctcggtcatacgtttcaaaatcggataaatcgctccctctgaaatagccagcgccgaggtggtttttaaggatgacgtcagctcataaccgtacatcggtttagaacgcagaagggataggatggccagctcgaaaatcccttttcgaaattgaacaatccagcggtcattaacttgattcgttttcatggtttaaatatatcgaaaaaaacactatatatcaatcacatatagcagtgtaaaatgtcctgtttttccttttaacaaaaatggaatttctcatactttttaacctttttattacataaatgtttttatattatgaaaagtgtaaaaacgattcttcaggttaaaaggagcagtcgaatgcagaaatcgatatcattttttgtcattttttcaatcctttggggttcgctatttctgttttctattattggcagcttagggacaaccccgattccgctgacaaaggactccaaatttctcatgtccagcatcctccctcagggctggggcttttttagcaaaaatccgcgtgatactgcaatcggcttatatgaggctgaaaatgccagcgccaaggtcagatggcccaatatgagggctgacaacctattcggcctgtatcggtatgggcggtcacaaggcgttgaaatgggcgtgatctacagccaagtcggcaaggaacagtggacagcatgtaaagaaaaggacctcggcgcatgcaaaagcaaagccaaaaccgtgcaattaaaaacacccgctccccgcccgctgctttgtggcagctactatttgacgaaagaggatattgttccttggagctattctaaatataccccttcgtcttatcaggtaaaaagcatagtcaaggttgtgatctcatgctcgaaaacataaaacagaccatcaccagatgggacgaaagaaacccgtggacaaatgtatatggcctcgcgcgaagcatcattgcgctatccagcctgctgacgctgctcatcaatcacccgagcctcattatgaagccagccagcgggatcagcagctatccagcttgtaaaatgaatctcagtctcttttgtctcggcgaaaataactatatgatgttaaatcttttcagatgggtctgcattgccattctggtgcttgttgtcattggctggcgccccagaatcaccggggttctgcattggtatgtcagttacagcctgcagtcatcgctgatcgtcatcgacggaggcgagcaggcagcagcagtcatgacctttttattgcttcccatcacgctgaccgatccgagaaaatggcattggagtacgagacctatagagggcaaaagaacacttggaaaaataacagcttttatttcttattttgtgatcagaatccaagtggcggtgctttattttcactctaccgtcgctaagctatctcagcaggaatgggtggacggaacggccgtctattatttcgcccaggaaaaaaccattggcttcaacggcttttttcaggcgttaacgaagccaattgtaacaagtccgttcgtggtgattccgacatgggggacgctgctggttcaaattgtcatcttcgcggcactgtttgcgccgaagaagcattggagattgattttgatcatcgctgtttttatgcatgagatttttgcagtcatgctgggcctcatcagtttttcgattatcatggccggcattttgatattgtatctcactcctatcgattccacgattcaatttacatatattcgcagactgttgtggaataaaaaacacaagaagggagaggtttcagtttgaagaaggcgtttctagtatttttgtcggttgtattggtgacgactgtgtttttggtgaagcagcaagaaagtgtggcacaggcaaagcagcttgagtattcaggtgaggaaatttttaaaggctttgtgtttgcccaaggggaagttggcaaacagcttccagaggtctttaataaagcgatgacagacaaactcaacacaaaacaggcaaaggcttttgccaatcaggttgtcgctgatattaaaaaagaggatgctgacttttttgataacctgaagaaagctgtttacagcaaagatgcattgaaagtggatgaactgctgaaaaaagcaggtcaaatcgttgaagaaaaagtagaagctgcaaaggaaatcgccgcttctaaggatgatacatccagagttcaggccgagcttgtcaacactgttgataccgctaactatttctattatgtttcttatgttgctgcagcaggtgccctgattctgatcattctcgccattgatattacgccgattgcgatttcagacaatgtggatcgcgaaatggcaatcagaacgctggttgatgaattaaactagacataaaaaaacggctcgctccgcagtctgctgcaggcgagccgttttcatgctattttttctcgtatgtccatccattttcctgatacacttttccgtttttcatcaaatggcccagcgcgcgtttaaaggcggctttgctcatattaaaacgttctctgatatcgtcaggctggcttttgtcactgtacggcatggcaccgtttctcattctcatatacgttagaatgcactcagcatcaactgacattgcatcctgttttctcggaagcagcgacaagttgactgaaccgtcttctttcacttgaatcacccggcctgtgactcttgaacccagtcttggctcctcttttctttctgacgggtgaataaaacagcggataccgtcatccgtgatcacgaatgaacccgatgcgatcagcctgtacaccgtacctgtcagctctttattcatcagatcttctgaagcgtcggtaaacagttcgctgatgatatcttccggcgctggtttcgcaaacatgcgcccccggttcgtcaccttcagcatacagtaaagtttgtcccctttttgcggccagacatcttcgtacggcggcaaatgctcagttgcgactagtgcgtccttcgataaaccgacatcaacgaaaacgcccatatcttccactttatccaccacttcaacccagccatattcatccgcgctgatgatcggaattttcatcgtggccgcaagcctttcctgctggtctacgtatataaagacttctacttcgtctctgtcctcgatatcctcagtcatttcactgttatgtaagagaatcgtatcttccccatcggttaaaaagtaaccgaagtcggtttggtgatctatactcaaggttaattgctgccctggtctcatgctatcgtccttcctgttccgcttattctctgcggattttgttaacattttttccaatcatcacaaattgattctttgttctgttggaagtttctctttattctactataatcaacacataagttaaatgttatggaggttttcatatggcaaaagaaagttcatttgatattgtatccaaggtggaattgcctgaagtgcaaaacgcaatccaaatcgcactgaaggaaatcagtacccgatatgactttaaaggcagcaaaagcgacatttctttagataaagaggagctggtcctcgtttccgatgacgaattcaaattaagccagctgaaagatgtgctggtcagcaaattgattaaacgaaacgtaccgacaaaaaacattgattacggcaaggttgaaaacgcgtcaggcggaacggtgcgccagcgtgcaaagcttgttcaaggcattgacaaggacaacgcaaaaaaaatcaatacgatcatcaaaaactccggactgaaagtaaagtctcaggtgcaggatgatcaagtgcgtgtcaccggaaaaaacaaagatgacctgcagcagattatctcagctgtacggggagcagatctgccaattgacgttcaatttataaatttcagataaattttctgattcctattgattattgtctttattttcggtaaatttggagaaagggaaaaacgccagatatcttttggcacttcctgacacgaaaatttcatatccgttcttatcaagagaagcagagggactggcccgacgaagcttcagcaaccggtgtaatggcgatcagccatgaccaaggtgctaaatccagcaagctcgaacagcttggaagataagaagagacaaaatcactgacaaagtcttcttcttaagaggactttttttatttctcttttttccttgctgatgtgaataaaggaggcagacaatgggacttttagaagatttgcaaagacaggtgttaatcggtgacggcgccatggggacgctcctctactcctatggcattgacaggtgttttgaggagctcaatatttcaaagccggaggaaattcagcgcatacataaagcgtacgttgaagcgggagccaacattattcaaacgaatacgtacggagccaactatattaaattatccagacacgggcttgaggatgacatcaaaaaaatgaatcaggaggccgtaaagatcgcgcgggcttcagcaggcgatgcatacgtgcttggaacgatgggcggcatacgcacatttaataaaaacgcatacagtcttgacgaaattaagcgcagcttccgcgagcagctgtatctgctgctgcatgaagagccggatggcttgctgttagaaacatattatgatttggaagaagcccgtgaagtgctgaaaatcgcgcgcaaagagactgatcttccgattatgctcaatgtctccatgcacgagcaaggcgtattgcaggacggaacgccgctttctgacgcattgcgctcgattgcggatctcggagctgatattgtcggcattaactgccgcctcggcccttatcacatgattgaagcgctaagcgaagtgccgatttttgatgacgtattcttatccgtttatccgaacagcagtcttccttcgcttgaagagggacggctcgtctatgaaacagacgacacgtattttcaaaacagcgcgtcagaattccgtaagcaaggtgcgcggattatcggcggctgctgcggcacaacgccgaatcacatcagggcgatggcggaagcggttggcgggctggctccgattacggaaaaagaagtcaaaacccgggcgaaagaattcatttctgttcatcacgagcgaaccgagcccggcctggatgagatcgcagcgaaaaaacgctctattatcgtagagctggacccgccgaaaaaactaagctttgacaaatttctgtccgctgctgctgaattaaaagaagcgggaatcgatgccctgacactcgccgacaattctttggcgaccccgcggatcagcaatgttgcctgcggcgcccttgtcaagcagcagctcgatatgcgttcccttgtccatattacgtgccgtgaccgtaacattatcggcttacagtcacatttaatgggccttgatacgttagggctgaatgacgtgcttgctattacaggtgacccttctaaaatcggggattttcctggggcgacgtctgtatatgatttaacatcttttgatttaatcaggctgatcaaacaattcaatgaaggtctgtctctgtctggaaaaccgctcggcaagaaaacgaatttctcagttgccgccgcatttaatcctaacgtccgccatctggataaagcggtaaaacggcttgagaaaaaaatagattgcggcgcagattattttgtttctcagcctgtctattccgagcagcagcttgtcgatatccataacgaaacaaaacatctgaagacgccgatctatatcggcatcatgccgctgacaagcagccggaatgccgaattcatccataatgaaattcccggcattaagctgtctgatacgattcgcgaaaaaatggcccatgccggtgaagataaagaaaagcaaaaggcggaaggccttgcaattgcacgctccctgctggatacggcatgcgagctgtttaacggcatctacttgataacgcctttcctcagatctgacttaaccgctgagctcacatcatatattcagcaaaaagatgagcagcgccaaaatatctttttgcattaatttccaaaagactgcctgatcgaatcgggcagtctttttcaacgagattcgtgttacgatatagaaaaacaatcatgaggaggaacattatgctcgaagtcaaaaccatttccgtggaagatacatatgaaatccggcatcgcattctgcgtccccatcaatccatcgaacaatgcaaatataaagaggatcacgcagaaggctcctttcatctcggcgtgttttatgatggaacgctgatcagcatcgcttctttttccccgcaaagtcagcctttattaacggaagcctctgcgtatcggctgagaggcatggcaacgctcgagggatatcgcgatcaaaaagctggaagcacgctgatcaaacacgcggagcacaaactggcggagagcggcgttcaggcggtatggtgcaacgcaagacaccatgtcaagggctactatgccaagcttggctggaaggaacttggcgaaccatttgacattcccggcattggcaatcatattgtcatgtacaaaacacttagaacaagcaggtgatcttatggacgtagtagatgaactgattaagcttcatgaagaacacgtttccggcttattgcggctttgcgggcaagccgggtggccggattatggcgaacaagagctgaaactgcttgttcagcagggacgctttttcggttatcaaaatgtcagcggtgatattatttcctgcatcggcttgtttttgtttggccgtcttacttctatcggccttgttatcgttgacaaggaatatcaacggctcggtcttggccggcgtatggtaaacgcctgtattacccaaacggatgaaaacaccgccatcaggctttgcgccacaaaagaaggtttgccgctttatgaaaaagcaggttttcatacggcaggttcagtgcgaaagtacagctgtcacagttttcaaccttatacaaaaaagcttgatgctgaactgacatcctttagagaacaagactttcacgacttaaccgcggcggatctggctgcctttggcggagatcgatcaaaccttttgcagcagcttatttctgcttcatgcgaatgtatcatcgccagaaatcaggacggacagctcattggctacggactttctgtacagacaccggccaatttgaaattcggccctatcatcgctccatcatcagatgttgcagcacagataattacaaggctggcggccggcaaacaagggccgatgcgaatcgatataccgagtgaacacacgtctctgcatgacagcctgatagaaatgggatttcataaagatgatgaacctccgattttgttctatcagaaaaaagcgcctattcaaaatggacacttatatgctttgatttcacaggctctcggttaaccctcttttttcccgaacaggtatcttctgttcggttttttgctgtctgatcgctgaataaacgaagccatcagggacattctaagcagaagaaaaggagtgtgctctgagatggaatcatcaaaacaaaataacggaatgacgattgtggcaatcggttcaatccctttaatattaaccctaggaaactcgatgcttattccgattttgccaaaaatgaaatctgaacttcatttatcacaatttcaagtcagtctcgtgatcacagtattttccttgattgcagcatttgcgattccgattgtcggttatctcgcagaccgattctcaaggaaagtcatcattattccctgcttaattttgtatggtgccggcggtttgttagccgggtttgcggcaggtttttttgacaatgcctatccttgggtcatggcaggacgagcgttacagggaatcggggcagccggaaccggcccaattgccatggcactgacgggagatctgtttaaaggcgcccaggagagcaaggtgctcggccttgttgaagcttcaaacggcatggggaaagtgctatcgccgatcattggctcgctgatcgccctgcttgtctggtatggcgcgttttttgcctttcctgtgttttgtatcatttcgatcgtactgacttggatttttattaaagaaaagaaaaaggaaaaagaaccgccaccaatcggacaatatgcaaaagggctgttaagtgtctttaaacatgaaggcagatggctgtttaccgcttatttagccggtgcgacctgtttgtttactttattcggcatcctgttttatctctcagatgttcttgaaaaaacatacgacaccgacggcgtgaaaaaaggcttaattttagcgatcccgcttttggttatgtgtgtgacgtcctatacaacaggaagcaaaatcgggcaaaagcaatcgttaatgaaaaagctgatcgtacttggattggcgttcatgaccgtatcctacgcggcactgtcattcattgaaaatcttgtcctttttatcagtgttcttgtactgagcagtataggctcaggtcttgtccttccttgtgtgaacagtttcattaccggggctgtcggcaaagaaagacggggatttgtcacctcgctgtacggctctgtacgtttcttaggggtagcgatcggtcctccgattttcggccgcctgatgcaatggtccagacccggcatgtttttaagcatcgcgggattgactctcgttgtcgggattcttgtgatgatgctcatccatgtgaagcaaaacaatgaagaaacaaaagaaaaagaagaccctaaaatggctggcaatcggctccagcccgctgaggaaaggtagcacccagtgtgaaaattgtacggattgaaacctttccgctatttcatcgattagaaaagccatacggagatgccaatgggtttaaacgatatcggacttgttatctcatcaggattatcaccgaaagcgggatagacggctggggagaatgcgttgattggctccctgctctccatgtcggttttacgaagcggatcatcccatttctattaggaaaacaggctggcagccgcctgtcattagtgcgcacgattcaaaaatggcaccagcgggcggcctccgctgtaagcatggcgctgacagagattgcagccaaagctgcggattgttcggtttgcgaattatggggcgggcgatacagagaggagattcctgtgtacgcgtcttttcaatcgtactcagactccccgcaatggatcagccgctcagtctccaatgttgaagcccagttgaaaaaaggttttgagcaaatcaaagtcaaaattggcgggacttcattcaaggaggatgtccggcacatcaatgcgctgcagcatacagcaggcagctccattacgatgattctggacgcaaaccaaagctacgatgccgctgcggcttttaaatgggagcgctatttctccgaatggacgaacattggctggcttgaggagcctttgccctttgatcagccgcaggattacgctatgcttcgaagccgtttgtctgttcctgttgccggcggagaaaacatgaaaggcccggcgcaatatgtgcctctcctttcacagcgctgtttggatatcattcagcccgatgtcatgcatgtcaacggaattgatgagtttcgggactgcctccagctcgcgcgttatttcggcgtcagagcatccgcccatgcatatgacggatcgctctcacggctctatgctttatttgcacaagcctgtctgcccccatggtctaaaatgaagaacgatcacattgaaccgatcgagtgggacgtcatggagaatccttttacagatctcgtcagcctgcagccttcaaaaggaatggtccacatcccgaaaggaaaaggcattggcacagagatcaatatggagatcgtcaatcgctacaagtgggatggctcagcctattaagctgggccatttctttattttgagacataaataatggacagcctcataaaatgaaaacagcggacaagtcttttcataaaggagcaaatgacttaatggctgaactgctgatgaaagcaaaacttacgtttatgattgtcgtaggcggcgtactacaaggactcggcatgtccttgtttttatttccgcatgatattccgacaggcggtgcagcaggtattgcggtgctattgcattatctgtttcaaatcccccacggattttcagtgtgggctgtgaatgtatcaatgctttttaccgctttaaaatggctggagatgagaacattcaccggcaccctcgcttctatcaccgtcacctctgtctcggtattgatctttgatgcagtttttcctgatatcacatctaacctgtggcttgatctggcaagcggcgcagtgttattgggactcggaatcggacttttatacaaatataaaatttcgaacggaggattcggagcccttgctctgatgatttctatctaccgcggcgggaatcctggaacgatcctgctcatcatgaattgcatcatttttatggtcaccgcgtctattattgactggggcatcgtcattcaagccctcatatgccaggtgatatcgacaagagtcatcgacttcatctacaacatccgcctgacctcacttccctatctcacgcctatgtaccgccataaaaaataataggcagaggctctcttcacgacgagagccccgcagccgctattttacagaaaaaaggtatcggatcttagccctaaacgcagcgtttccaacgcgatggcatcatgaaatggaatattggcaagattcacattcggcccgattttttgaataaacccttgctgaagcgttttgttaggcgcttcaaaaatcagcctgttgatatcaatatccgaggaaatgatgtcgtcaacaatttgaaacctgacatcgccgctgctggaacagatccctcccgttccgctttctctggcttctgtaatcactttttccgcgcccgcttccatatcctcaacgatatattcaagccattcctcagagctttgccggcttgctaattccgcatccttgctgcccacctcactgagcacaagaaattcatcagaaaaatcggcaatgtaagccgctttctctttatttgtcatcgggagcgtaccgtttgaaatctcaatatattcacagccgaaataggtgcagtaccgatgaaattcattcacttttttctggcttacgtacttttcaaacagtgtgccgccaaagaaaaatgtaatgtcatgttctttcagtgtgctgattttttcttcaagatctttcgtaagtaatgatgtgccccagccgaatttcacaaaatcaatatagtcggacgctccggctatcgcatctttgaaaaattgcaagggatagccgttatcaattaaaatggactgcccggtttctctcggcttgtttgttctcactggcaattctagtgaaaaatcattcatattatgaccctctctatcgttggaacttctccatcttgtttcactttcatcacgaaatcgcccgtcagttcttttgtacagtaaacgatgtcttccgaatcaaacaatggctggcggcagtcaaaaaacttctccgcaacagaagagccttttattctttcaatcgcctccgcagccgttaccacatttgtcccttcaatgatgcctttgatatactccgcacatgccatatcgtcatcaccggatggatgggaagccactatgtttatgacacaatcgtttgcgacgagctttttcacatgctgtgccgttgttttggcattggaaaatccagttacgaacagatgctttgcgttcagcgcccccaatgctgctgtgacgccgtttgttgttttctggatcaggcttttatccgtcatattctgcccagccatacgttttggagaattatctaaatcaaatccgctgataccgacccccttttcctctcccgtcaaaacataatccggataggtgtctttcagcgcaaaggcttcatcagctgtccggaccaacaaaatctctttcgccccgccgataaacgcataatgggcgaccgtaaaggctctgatgacatcaatgacgatgttaatgtccgccggggcaagcgaatgatgatgcccctgataaatggcaatcggcatactacctctccttgggcataaaaccattttgctaaaaagcatattcagccgggctcttaatggttccgcacctcattttaggcgggcgcggcacctaaaacctgaacctttatgcaaaaaatgaatagtctgcctataactcgatcaatagataaaaaaagcagatgcaaacggggggaaaacattgaacgaaaccatcacatatgacacttggaacgacatgctgtccaaacagataacggatcaattgatcgatgagctcgatgtgttgaaatgggcttaccgaacgtacggagaaaagattgtgtacgcctgcagctttggcgcagaaggaatggtgcttctcgacttaatatcaaaaatcaacaaaaacgcacacatcatctttttggataccgggcttcattttcaggaaacatatgagctgatcgagaccgtcaaagaacgatatccgggatttgcaatccagatgctcgaacccgagctgagcttaacagaacaggggacgaagtacggcggagagctgtggaagcataacccgaacctctgctgccaattgcggaaaatcgaaccgctcaaaaagcacctgtccggcatgacagcttggatttcaggactgcgccgggatcagtcaccaacgagaaagcatattcaatacgtaaacctggaccagaagtttgagctcatcaaaatttgcccgcttatccactggacatgggatgacgtttggacgtacatccgcctgcacaatttgccttataacaaactgcacgatcaacattatccgagcataggctgtgaaatgtgtacactgccttccccggacccgaacgatgagagggctggaagatgggccggacgggagaaaacagaatgcggcctgcatcaagaatagcggatggcaggttcttgatgtgagaatcgaaatgatgttaaggcgctgatgtcaaactttcattaagtgcagaaaagaaaacaaggaaacgtataaatggaggttgaacacgttgaatggaaacgaaccccacggaggggtattaatcaaccgctgtgatcccgcatgccattttgaagggtgcgcgtgccaagcagagctggatcagcttgcactgagtgatctggagcttattgcgatcggcggctacagcccgttaacaggttttttgggagaaaaagattatcattccgttgtgaaagagatgaggctggcaaacggcttgccgtggagcctgccgattacgctgcctgtcggagaaaaaacagcaagacagctgtctgccggagatcacgtcaagcttgtgaaagacggtgttacctacggcatgatcacagtcaccgatatataccagcctgataaaacacaagaagcactgtctgtttttaaaacaaacgatcctgcccacccaggcgtaaaaaaattgctggcgcgcccggattactatatcggagggcctatcacggtcagcagcctgcctgacaaatctttcgaacagttttatgcaacgcccgctgaaacaagagcggcctttcaaaaactcggctggaagacgattgtcggctttcaaaccaggaaccctgttcacagagcgcatgaatacattcaaaaaacagcgttagaaacggtcgacggtctgctgcttcacccacttgtcggagaaacaaagtcagacgatatccccagcgatatcagaatggagagctaccaggctttgcttaatcactattatccaaaggatcgtgtcatgttatcggttttccctgccgccatgcgttatgcaggtccgcgggaagcgattttccatgcgctcgtccgaaaaaattacggctgtacccattttattgtaggccgtgatcacgcgggtgtcggcagctactatggaacatacgacgcccaaaatatttttcaatcattcacagaggaagagctgggcatcaagccgctgttttttgagcacagcttttattgccgaaaatgcggaaacatgggcacctccaaaacatgtccgcacagcccgagagaccacatccacttatcaggcacaaaagtgagagagcttctccgccaaggcaaaaagccgcctaaagaattcagccggcctgaggtcgcagccgtgctgatcaagggacttcaccaacagcctgttgccatcaagcaaaacagcggggaattgcaatgacacacaatccgaacatcatttggcatcccgctgccatctcaaagtctgacagacagtccttaaacggacacaaaagctgcgtcctttggtttacaggtttgtccggctccggaaaatcggtgctggccaatgctgtcgatgaaaagctttaccgcaagggcattcagagctacgtgcttgacggtgataatatccgccacggcttaaacaaagatcttggatttcagactggtgacaggattgaaaacatccgccggatcggagaagtggcgaagctgtttgtcgacagcgggcaaatgattttaacggcttttatttctccattcagagaggatcgggacatggttagagcgctctttcctaaaggtgagttcttcgaaatttatgtgaagtgcccgctgcatgtttgtgaacagcgcgatccaaaagggctttataaaaaagcgcgaaacggagagatcaaacatttcaccgggatcgattctccgtatgaagcgccgctttcacccgatttcatcattgagtctgaccagacctctatttccgatggagctgatctcatcattaacgcactgcaaaacagaggaattatataaaaaacccgatcaatgtcgggttttttcttatgagttggagaactgcgcaatcaaactgttgatcttctctttttcctcataaaatgctccgtgcccgctgtttgcaaacggaaccaattccgactgtttgatgccgcgcttcaattctttcgcaaaatcaaacggcgcaattctatcctttctcccgtgcaggatcagcgtcggcaccttgattgcagcaagttcctttctgagatcttcgtctcttaatgcgatgcccgagtggatcgtcccgtaggaggaagcctccagcatcagattgagaaaccactgcctaagctctggagacacttttttctcaaaaaactgtttccctaaatcagccagtgttttgggccgatcagctttgaacaattcaatcatatcgtcaatatcctgcttcctcatcccgtacggataacccgggcgttttgtaaacgcgggggccgccgcagacagtaaaatcagcttatcaacatcggctccttcatgccttgccatataacggattgcaattgcgccgcccattgaaaaaccggcaagaatcgcattctcaagctgcagcgtataaatgactgctttcacatcatcggccatcgtgtcataatcgtagccttcccaagggcggtcagattgcccatatccccgcaaatcaacgccgataaaacgaaatccccttttcggaagctcattcatttgatattcaaacatcttatgattcaacggccacccgtgcaaaaagatgatcggccttccatgtccgatatcctctacaaacagtgtcacatgctcctcggttttgatgtaatgccccattccgcattcctcctgttccctttggctttttcggcctgtaaacgccttgacgtataggaagctttccatttatgcttacaaaacaagcgggctgctgtaccaagaaaaggctcttcacgatttactatatgtatcaatttccttaacgatctattaaattgaacccggaagcctctgtttttcgggcagcaaaggatgtcatcacatgaataaaatcgcaattcaaaaaccgaacataccggaaaacctgcaaaccgcagattttcatgatgccgtgacacaggatgatgtaatcagcatgcatttgtttgaagattgcaccatctgcggcgaagatatcgaaagactatgtgttgaaaaaacggtattcagaaatgtcgtctttatcgatgtgtcttttcggcatattgaactgaccgatgtgatctttgaaaaatgcgatttatcaaacgccgatttcagcggggctgtcattcacagaacttcagttaagcagtcaaaaatggttggaatgaatgtggcggaagcaacgctgcggaatgtttcattcgaggaatgccacggacatttcagctcattttcgtactcaaatatgaaacaagttcgatttgatcactgtgctcttatgcaaagtgaatgcagcgatacggtgctccagcagacacactttgacggatgcgaattggaaggcgccagctttaccggcacgtcccttcaaaacatggacatcagcacgtgccgttttgaacagcttcatgtctccctcgacaaattgaaaggctgcaaaatcgcacctgagcacgcgattgccttcgccagggcactgggagctgtcatcgtataaccaaagcctaggacatcatcaggcggcgtgctgtttcagctgccgctttaatgccagtttccaaatctccaagagatgcataggaatatgacagcctgatgctgtttcggtcttcaccgtcataaatatagccgggattcacaagcacctgccgtttcagcaattcataaaagaaacggctgacaggcaggtttttgtgaaatgtcacccaaatataaaagccgcctgcgggaatccgccacgtggcaatgtccccggcataccgctcgagaaaatgaacggcggcgtctctcctttctttaagcttcctgcgtacccaagtcagatgctcttcataatatccctgtgacagccactcggcagccgcccactgggacaggccgcttgatccgtagtctgtctgcattttaatgtccgccagcctttcaataaccggctccggaccggcaagccagccgattcgcagaccggggctaaccgtttttgaaaacgcgcccagatacagaatattgccctcatgatccattgctttcaacggctgcggcggtttttcttcaaaccataaatcaccgtacgcatcatcctcaatgatgggcatctgctctttttttgacaggctgatgatctctttccttcgctgctctgacatgactgtgcctgtcggattatgaaacgacggaatcgtgtaaagcagctgtcctccatattgttttcgattagaagaaacaagccccgctttgaccccttcatcatccatcggcaagccgcgaagccgcatcccagctgattgaaatacatgcaaggattgaaggtaggacggcttctccgtcaaaatgacagaatctcgttttaaaagtccaattgagatgagctgaagtgcctgaagtgcaccggacacaattaaaattgcagacggtgacacatggatcttctttccttttaaatggtcggccactgcctcccgcagctgacggtttcctttcggctgctcatatcctaaagacaggacgcccggattgatttgctgaaacatccgtccaattgtgtcagcaggcacaagatccggtgaaagttctccagttcctaatctgatgatatccgctcttggttcgttctgattaatagcttgaatgatggaagaattggcgcgatgaatgcccgaacggacgtaatcgctccaatcaagcggaggctcagccgtcagcacgctccaagtactgtttacaaccttcgtaccgccgccttttcttccctctaacaagccttgagacgtgagttcatctatggctgctgtgactgtgctgcggttgacttgaaacatgtcggccagcgttctctgtgaggggattttcgtccctacagcccactctccgtgaagaatcttgtctttcatatattgttcgatctgccgatgcagcggaacatccgactttcggcttggctgccattgcgacaaggtcatgccccccttttttacacattatacatttggctggttcctaacccaaccaaatggctggagactttagtgacaatctctcttatgattgaaaaaaaatgtgaaaggagctttttcagcatgaatgcaatcattcacggaattgtgctcgcgtttggcttaattttgccgctgggagtgcagaatgtgtttatttttcagcaaggcgcgttgcaaaagcatatttggcgggctctcccagctgtcatcagtgcttcagtctgcgataccttgttaattgtattagccgttgcgggcgtgtctgtcattgtgcaggagctgcctgtgtttgagacagtcatgatggccggcggatttttatttttgctttatatgggctgggtgacttggaacatccgtccgaacacaagccaaaatgagaaacatacgttcacaccaaaaaagcaagctgcgtttgcggccgctgtttctcttttaaacccgcatgccattctggacacgatcggcgtcatcggcacgagctctcttcaatattcggggcttgagaaatggctctttatggccgcctgcatcgctgtgtcttggatttggttcatcagccttgcaatagcgggccggttgtttcagacgatagatacgagcggcaggcttatgctgatcgtaaacaaatgctctgcagcggtaatgtgggcagcggcaggatattttggggtgtcactcttttgcaattgaaggagaaacagatgaaaaaaacgaatttcttagaaaagggggcatgctgatgactgatgcaaaacagttttatgactatcattcttgggcaaacaagaaaatatttacccatatcgaaaacctgccggaggaaactgcctatcaagaagtaaagagcgtatttccttctgtcagcgacgtgctgcttcatatgtgcagggctgactacatttggctgaatgttctttcgggagtggcctaccaagagattatagacagcgcaggcaaattacagtccgcgcaaggtaatatggcagcgattaaacagcacgctgccgagctggagtcacagtatcatgatttcttcagccgccagacggacttagaacagaccttcacaatgcagcatccgaaactaggtacactggaatcaacctatgcagacaccatcctgcatgtcgtcaatcacggcacttaccacagagggaacgtaaccgccatgctgagacagctggaccattcaggcgtacctactgattatatgtactatttatatgagaaaagagaaagcaagggctaaaatgcccttgctttttttgcggaaagcctcaaatgcaacatacttagcttttacatacctgtataagcgcgcttcacatctagctgtaccggcatgccgtttcgaaaggaattggttgcggcgatacccacttctaaattgatcgtcgcatcaatatcagtcacaatcggtgtttttccattccggacacactcggcgaaatgctgaagctccaagcagtaggcttcatgaaaacgagtttgaaagtctggaatgatatcaaaactgctccctttagccgataggatggtcacatgttgatgtctcaatgtccctatgaaaatactgccctctgtcccgatcacctccgcccggatgtcatgtccgtatggagaggttctgcttgcctcgacgtcccccgctgcgcccgagtcaaattcaatatacgtcagcgcctgatccacatcgccatactgctccataaacggattgttcagaatcctgccgtgtcctgaaacagaagtgatttccgcccctagcaaataacgggcaatatcatagtcatggatggaacagtcgataaaaattccaccgctgtgtttgataaattctgcgggaggcgcgccttggtcgcgcgtaaagcctttataatagataggtttgccgatttctccagcgtcgatccgccgtttggcatctgcgtatgcgggatcgaaccgtctcataaagccgacttggcagatgacacctgtctccttaactttttcagaagctgcttttgattcctcaaggcttaatgtcagcggtttttcaacaaagatctgtttgccgttctcggctgctttgatgatcatatcaccatgtgtgcttgtcggcgttacgataatgacagcatcaatgccgggatcttctaacacttcatacgggtcctctgaccatttttcgataccgagttctctggcaacctgctccgctctcccttttaacggatcaccgacacaaaccagctttgcccccggcacactggtgacgagatttttcgcatgataataaccgagccttcctaatcccaatactgcacatcttacttgatgttccacgtcccatcctctcctttatctcatttcgggctcgctttgagaaagcgttttctcttaacagctaaaaaaacagcggttctatccgctctgccattttgcgcaagcgctttctcaaaagatggttatattttacaccgcctttggtttacacgcaatatgtttttttggcttcaactgtcataatgaaaaaacccgctcattagcgggctcatgtgttgagcggtgatgtagaatgtctgactacaagctcaggcgggagcactattttttgtttcgcctttcgttttccctctattgcttctgccagcagttcgatgacgctccgccccatctcttttatcggctgggctacggttgtcaggggcggagccgccatttctgcgagtatcgtattatcaaaaccaatgatagaaagatcatccggcacttttatgcctcttattctcgcagcttgtatggcggcacaagccaatacgtcgttgaaggcaaaaatagcagtcggagcatttctgtcgagcaattttcccgcttcttccttgccgctttccaaggaaaaccgcgtctggatgataagtgattcatcaatgggcacgcccgcttcctccatcgcctgacggaagcctttgattctatttttttcgcctgtcgttgacccgtctccgataatgcaggcgatgttcgtgtggccgagtgacagaagatgcttggcagcctcatatccgccacgaacgtcgtctatcacaacaatatccatcggaagaagcggcttatcctgagaaatcatggcaatcggaatttgttcactggcgatttcctccaaagcagacatactgtcatggctttcaatccctgttgcaaaaataatgccatccacctttttctgtttcagcacagaaaaatactttgtttcttttttcggatcgtaatcggtgctgcaaatcaacatttgaaaaccgagctcatccgctctttcctcaatgcttttggccagttcgccgtaaaacggatttgaaatatcaggcgccacgagagcgatcatattcgttcgttttcccgttaacgccgcggcgtggacattgggcgtgtatgccatttcattcatgacattcatgaccttctgccgtgttttatcgctgattctccccgtattgtttatcacacgggacacagttgtgatcgaaacacccgccgcctttgccacatcgtaaattgttgttttcatgttcatccctcgtctggttattgaactttccggctgacaattttccggtattcaattggtgaaatgccttctatctgcttaaagagttttgaaaagtatgtcggatcttccattccgaccgtttccgcaataacgcccattttatcatttgtagaggataaaagacgcttcgcttccgtcattctcacccggttcgtgtattgtgccggagttacgccgagcacctgctgcatgcagcggctcacataatcctgatgatagtgaagggcgagcgacagatccttgattgtcgtcttttccttatagtgctcctgtaaataccgggccgcctcccaggctacccgctctttcgcagacggtatttggaacgcttctttttgaagatgcagcatcagctcctcaaataaaatttgctttctgagcggcaaatcagagttttccgcggagtaatcgatcagcttttcaaactgctgcgccataaactgcgggcgctgcaccttgccttttctcggcaaggccaatccgtagcgggccggctcttcgaagctccctttttcctgctgaagctcagaccagttgctgcctccctttgccgtaaattcatatcgatgttcatcgaagtgaagccaatagtaggaggttgcttcatcactgcccttcgtcccgtagtgttcaagaccgggagaaagcaagatgtactcgccgccttcaacagaaaacgatgtttcattttccgttatatataacgttccctgtttgacatatatcagatcaaacacggagaatacacgtttcacatgggtttctccttttttaaaaaccccttccccagctgcgataaataccggaaaaggcgggactgtaaacaggatgcgaggcatttgaatcatcctcctttttaagtcggatttttacaagaagtatcgtttctatccctttttattataaggaaatggaggtacactttaaaacgttgattttatttacgaaaggggttagacacgatgaaacaagctgtcttcaaatcaactgctttgaaaaaacccgctgacaaaacgttctcattattttcgcttacttggccgatctttattgaggtctcattatatatgtttatgggtaatgccgatacactgatgctcagccaatactcggataacagcgtggcagcagtcggcgtcagcaaccagattttaaatttaattatcgtgatgttcagctttatcgcaacaggaacgaccgttatcatttcacaatttctaggctcacggcaaaagaaagaagccatggaagtcgcttatgtgtcaatcggcgccaacttcttcatcagcctggccatcagcgccgtcgtctttttcgcggctgtccctctgcttcatatgatgggattatcagacgcactgatgcctgatgcgaaagtctttttacaagttgtcggaggtctgtcctttattcaggctttaatcatgacattcagcgcgatcttaaaaagctacggctacacaaaagatacaatgtttgtcactatcggcatgaacattttaaacattgccggaaactttgttgtgattttcggtttgttcggctttcctgttctcggtgttgccggtgtggccatgtccacatctatcgcccgcgtcatcggattaatcgcgatgattgtgattgtcaacaaacgcatccagctgaagatgtcgctgaaaaaagtctttcatatgcataaagagcatttgcgcaagctgctgaaaatcggcattccttctgcgggagagcagctttcatacaacctgtcgcaaatgatagtcacgtattttatcgccatcatgggcgcgcaggcgttgacaacaaaagtgtatacgcaaaatattacgatgtttattttgctgttcggcactgcgatcagccagggtacacaaatcttaatcggccgttatatcggcggcaaacaatttgatgccgcttatgagcgctgcatgaagagcttatattgggcactcggaattgctgcggctacctctgttttgatgacgatcttttcaaaagacctgatcggactcttcacacaaagccctgacattatagcaactgcaagcctattgattgccatgaccattatccttgaaccaggccgctcgtttaatgtcattatcattaactctctgcgggccgcgggggatgcgaaattcccggtttacatggcaatgatttcaatgtggggcattggcctcccgcttgcttatcttttcggcatccacctcggtttcggtcttgccggcatttggatttcttttatcgcggatgaatgggtccggggaatcttaatgtacagaagatggcgctcacgtatctggattcaaaaaggtatggcgtaacacccggctcaatcaaggccgggtgttttttagatatcagacagaatctgcttcacttcggtctctgtgagagcgaagtgatattgaaatacatcgtgctgcttcgcccggattttttctaaaacagcccggtgcaaatgaagagcggctttcaccgttttttgagaatactgcggaaatagcggcaaggcatcctgacactcttcaaggtaggcttctgcttcaaaagcgatatactcccacgtcattgtgaacgctttatttacggtgcctttttggagatcagcctctgtatagccgaattgctgcattacctgacggggaatgcggtttttttgctgatctgtgccaagatcacttaagaagcgaaccagctgtatggccaagccgagagagacggctgcttgtttgagctgatcttgttttcggcgtgtcagtatcggcagcagcatcaatccggcagcaccgcccgtccgatatgcgtacatgagcagttcatcaaggtcatcatacggcttggcgtcttctttttgtgcggcaataaactcccgaaaaggttcgctttccaatgtaaaggtccgatacgcatgatcaaaagccttccatagatgttgtttaccgttatttgtcctttggtaaacatgatcagctttagcttcaaatgcgggcaataccttttcgtctgcactggccgccgtgtggcaaaacgacaatactgcccaagaggcttgtctttgctttagcgggagatatgataatgctttgaaacaggctggcgcgtattcgccaacaatctgtccgcattgctggtaagcttcttttatctctttcattttctcactcctatgtatcactgcttcttcaagtctagtatgttttttcctaattgtatatgaagaaaatgccgattcttactttgtaaaagtaacaagacgcacagcatcatcgacgagatatgcattattatttttaatgccatacaacaggtagaatgtaaacatttctcaatcatcacttcattaatagaggaatcacggaaaaaagggctaattgttatgatacatgatagtattggagtgagtttagtgatgaaattttttgaatataactggcaggttagagatcaatggtttacttggtgtcatcaactaaccactgaagaattacttaaaaatcgtcttggcggagtagagaatattttatataccctttttcatattattgatgtggaatatagttggattcgtgctatccaaggaaaagaagatatcgctgttcagttcgctgattatcaaacactcaataaagtgaaatctctctcaaatacattccgaactgaaataattgatgttttacaaacacattcagatcaaataaaagatgaacttgtaagcgttccttgggagacaggtgttttatatacgcgagatgaaatattacaccatatcatcgctcacgaaattcaccatattggtcaactttctgtatgggctagggaattaaagttaagcccggtatcagctagttttatcggcagaacattaaaacctattcattcttattgaaggaatgcgggggcaattcgatagtgctgttgtacaaaaaaggatagatagagcatatatttccctgctcatctatccttcttatttaaatctatacatctctggcttttaatcacatttgtattgaacctacctctcgtcaatatcaatgcgatacgcttcaaaccatgtatgaatttgagcaagatgggcgatcagctgaggccccttcatgagctgcccgaaccacgggaccttgaaggaggagccttccgtttctaaaagctgatctaattgttttctgtccagtaaggtatggagcacggagtccttttggcttctgatcgttttcagccactcgctgacgccttttgtatattccggatgatgtgttttcggatatgggctttttttgcgatacaaaatgtcatcaggcaaaatgccctcaagcgctttgcgcaaaatgcctttttcccgattatcatgcattttcatttcccacggaatattccaaacatattccacaagccggtgatcggcgaacggcacccgcacttccaggctcgcccccatgctcatgcgatccttccgatccaaaaggttcgtcataaaccaaagcatatttaaatagaacagctgtcttcttgctttatccacacccgtttctccgtctaataatggcgtttctgccaaggtttcttcatatttggcatttacgtattctttcagattcaattttttctgccatgagtcagaaagcagcttgatccgctcctccgttgatctcatccatggaaagccagactcaacatctgccgtatggaaccacgggtacccgccgaaaatctcatccgcgcattctcccgataggctgacgacaaagtcctttttgatttcccggcaaaaccacagcagggatgagtcgacatctgccattcccggcaagtctttgaccagtacagcttcctccaaatgatcaacgaggtctttttggctgatgacgcatttgtggtgcgttgtgccgaaagcctctgtcattttttcaatccatggtccgtcatcattcggctgaaaagcgcttgcttgaaaatatttatcgttctcttcgtaatcaatcgaataagtatgaagcggtgcttttccttccttttcaaaatggcccgccgcaatcgctgtaatcgcgcttgagtccagaccgcctgataggaatgtgcaaacaggcacatccgacacaagctgccgcgtcaccgcgtcctgaaataacgatctgacattggcaaccgtgtcatcaaaactgtccgtatgtttttcgctttcaacattccaataacgccaaatattaagtccgtctttggaaaatgtcagcgcgtgagccgggcggatttcttttatgcctttaaatatgccagtgcccggggttctggacggtccaagaccgaaaatttcagaaagtcccgttctgtccactcgcgcttttatatcagggtgcgcgaggattgctttgatttccgacccgaagagaaatgaagagccttccttcgtgtaaaaaaacggctttacaccgagacggtctctcgcggcaaacaacagattacgcttttcatcccacacagcgaaagcgaatatgccattgagatggtcgacacagtcttcctgccactcgatgtagctgtgcagaagcacctcggtatctgacgtacgctcgaattgatggccccgcgcccgcaattctttgcgcaaatcttccgtgttataaagctcgccattgtaaataatggtgtacgtatcgcctttataggtacacgccatcggctggcgtccgccttcaatatcaacaaccgcaagtcttttatgtccgaataaaacatggtgctccccccaaacgtttgaatcatcaggccctcgtttggaaagagtgtctgtcattctgtccatcgtttgtttttcctggacgagctgctttttaaaatcgacccaacccgtaattccacacatgtgacatcagctccaatcccgtttctttcgtaacaatttcgtttctttcagcaccttagtaagtttatgcatctataggcagatagttgatttgtccataaaagagttgtatgggacaggcttgaattggaaagaaaagagaggaatgaagaaaaaggagacagcatggatgaaacggaaacaattgttatatacagaggaacgaaagtgggaatacggcaccatcctcattgaagacggcatctgcttaatcgaaaacggtgaaggcgatatactgctggcggacagtctccaacacagcccaatctggatccatcataaaggaaagtgggagcaagccggctttcaggacaagttggttttggcatgcggtgcagaaaacatctccctttccggcggagaacgcatccgctatgagaaatcagtcaagcggccgctcatggcgcttttggattcgcttgacgacgaaacctttctcgcatttctgcagcacttgcacagcttcggcttatcggtattcgattgcgtcttttcttataataaaggagtcttttcgaatacttcggcggggcagggtgtgtccttttatcacttttcaaatgacaccgcacaatgcgcgatgcagcatcactacaactacagcagcgaagggacaggagaccgttttgaatggacggcttcaaacggaaagcgatccattatgtacacagcagtccaacgggggcgcaaataaaaaagcggtgcatcgagcaccgctttttggttacttttcaacaacaacttttgcttccttgctttcttttttatctgtatccacagccgtgacgtacagcaccgttccggctttttgttttttgattttcaccgaaaacgttccttttgcgtcagctttggcagaagcaatgactttctttgatttgtttttcactctgatcatcgctttgctgtttgccttcccttttactgccgtatccttcgttttcaccgcgtttactttcggtgtgccggaaggttttcctttgacgacaacaactttatacgatgttttcgcatcgccttttgttgctttcagatacagtacttgatcctgtttttgagtcgcgatattcaccttgaacgcattgtcttttccggctttggcgctgccgagtttctttttgccgttcatcacctcgataagggtgccttccttcgcgcttcctctgacagctgtttgagtgctttccagcttgttgaccttaagctgtaaatcagctgcgctgacagccttcatgacattcagccgcccgtagcctgaatgccagtctacaccaggtgtcttcggaatttcaatcggatcgccataatcgtcatacaactcttcttctccgccatcgacactttcaaaggaaatatcatctgccgtctttttcaacatatcctcaacttctgttctttttagcttaggattttgagcaaacagcagtcccgcagcggcggcagcatatggcgtcgccatagacgttccgctcatgtacgtgacatttccgttcggcactaagctcgggatatcagaccctggagcagagatgtccagaccttttccatagttagagaaatcagcggtcatatccatgcgattcgttgcgccgactgacatcacatatttagaagatgcaggataagataaggcattttctccatcattcccgctggctgcggcaatcaagacatttttgtcagctgcgtacttcaaagcaaattcaagcacgcggctgtagcctccgcctaaacttaaattaatcacctttgctcctttgtcagcagcatatttgatgccgagagcaatttgttcagtatctccggaacctgcggaatcaagcacttttacagggatgatttttgctttggcattcaatccagtcattgaatagccgttatcgctttgggctgcaataatgcctgcgacatgcgtcccatgcccctgatcatccattgcattgttatttcgtccgacaaaattgtgtccgagatctgttcttacttttccttttaaatcggcaagcgtgctgtctacgcctgtgtctactactgcaatgagtgtatcgttaagcttgcgtttggacagcaatgtgttggcaggctcatatttcacatccgcatttttgacaccgccgttttcaccgttgtttttaagcggccattgataagggtactgaatatcgtttgccaagcttttgtattcctgtacgggttccgcaaactctacattggacatcttggatagtgtcgcagcagcgcttttgacccttttggcgcttgccgtatatgcgccgttctgtttctcgtctttcggaagttcaaatgaatacagattgtcaaacagtttctttgcctttttcacattagatatgtcttttttcgattgcgcgcttgcagaaaagcccttcatttcattatgtacggatgagaggcttttattgtccttcaccttgaaaataacctttgttgtctgaacttcactttttgctgcaatattgttttctgttaaaatggctcctgctgttttgccttgcagctgcttcatatttagtcggtccgcttgtttctttatctcctctttaaggaatgacgggactgattgtaaagctttatcatatagccggttgatcgctttttgatccttttcagtgaccttatacgaagatgatgctccgttttctgacacatcgtcaaataacggctttaatgtcacaagatcctgatagatttcatttcttgctgttttattgagtgcgagctttgcaacgataaacggtgctgctttgtaataaaggcttgtcagttctttgccttctgctgtttggctcagctgctcatcacgaatcgatctcaacttatccaggatgccttttcctgatttcttctgatcgacactcatttcaaccggacaagcttcttcctcttctaaatctgacggctgttttttggtgcctttatacccaatcgtatacttggcttctgcagctgcttctgccgttccgccgtcctctggttcttcttctccgaggtattcaacttttacatagtaagggccgctccacgcgtatggaaaaatgacttcgctttttccatcctccgctgtgaaagaacggtacatctcaaacgtctcatctttaagcgctttttccttacttggatatacagatacattcagtactgaatcactctttacggtcagtgccatatgtgagtttttctgaatatccgttgctcccggggtcactttgtaccatttcacctgttccggctccttcatggcgcctgtctgctctttgccgttttccagagcagccgcctgatcgatcgcgccggccgctgcagctttggttcccggagaaaaaaggctgaaaatcagtgcaaaaataagcactgccgccacaaccgagctgaattttctgcgtttcatgttatccctcctgcaaaataatgaatctccttgaaggtatcataatttcataggacgagataccgcttacagggaattttaaggttattttaaatgatttggaatatgaggggataaatataaaaaaaaccagctctatcaaagagccgggttcataggtttttctattaaaacaattgaaaaccaattggcaaatgcagaccgagcagcactgtcagcaaaaggacaatgacgaagccgacccacaggcctcctgttgatttttcttttttcttgcggatgaggagcatttccatcaggccgatggtgataatgcccagaatcattttgccggcgtattctccgttccagttggcgaaacggacaaacagctcagctcctgtcaaaataataaggatatagaataaccgcagaatcatatgagtgatttttgcgccctttgcacttcctgacgaatacagcgagtagctgacgaaaagcagaatcagcgctaccacccatgtcgtaatatgtaggtgtgtcatatatgttccccctatcagataaattaccccacttatagtaccatgaacttgtcctctgtcacaaagatgattatcagaaaaaacgggcgggtccgggtccgccctccagttttattcagccaatttggtttgacagcgttccgatcggatcaattgtaatatcaattttgtcacctgaccgcaagaattttggaggcgtaaaccccttgccgacaccagacggcgtaccggtggcaataatgtcgcccgcttcaagcgtcatcccctttgagagggtttcaattaattccggaatggaaaagatcatatcgcttgccgaaccggattggcgcagctcgccgttgactcttgtttcaaccttgaggcgctctggctcctgaatagatgatttatgtacaagcacgggccccatcggacatgtcgtatccaagctttttccgataaaaaactgcttatgccttttttgcagatcacgcgccgtgatatcattcacaatcgtatatccgaaaacatggtcatatgcatcttcttttgaaatgcgagtcccgctttttccgatcacgacagcaagttctccctcataatcaagctgagaggtaacctcttcatggctctttacgatatcaccatgccccgtaaccgttaccggcgattttgtaaataccatcggatgctccggaatatcagcctcgctccccatttcaatcgcgtgatcccggtagtttttgccgatgcagatgatattttttgatggcttcggaatgggtgcatggagcttcacctcagataatgaatacataaatgatcccagctcatcattcggtttctttgcccactcggccagctgccttgcatgcgcaacgaatttatccccttctgcgatacattcaatcagcgatcccggaatcgtctcaagttcaaacagttttttttcagccttctgcaaatccataattttctcatcgtcaatgatcaggccgacaaacattcggttgtaaagttcccctgtcgcaaatttcatgttattcctccatcatcttttaaatcagaatgctccttcatgtattctctgtcgaatgctgaaatccctttttctcaattccgttttcatttcgtttcaggacgggcttgctctacatatcatacaaatgtcgttttgagaaggaggaaagaatatggagcgcgtgcatttattttttcatcgggagcagctgaaaaggaaaggtacagccaaggggcttttcgtaacagatcgatctgtttctcccattcttctcacacagcgtgacagagcggaaaaggcatcctatgaaatcagctgggaaaagtctctgcttggtgaaaggacactttttttgaatgcagaacaggatgatccgtccctgatgcggcgcagactcgcctattgtttttttgaccagatcggcgtacctgctcccgttgcctcgtacagctttctgaccatcaatggccagcctgaaggcatttatttgaacatcaagaaccatcagccagccggtaaaaggagttacggagtgaagacggccgatccaagggttccattgtccctttttaacaatgattcctcggcattcttacatgaatttttcatactgatccgcacagccggagatgacgaattggctgaaaggattaaattgtatctggatgtcaagctgttttttttgtggctgatcggcaacacctgcaccaatcaaggcttttactacacattttgtttaaacgaatccggtcggctttacgtttccccgatggagacaagatcgcttgccgtacaagaatggtatgaagaagacccgcttctgacaaaaggaaagacgctttcgtcaaggcttctatccattcccgccttcaggtcgcaatatcacaccttaatgaaaaacgtgctgaagcggtcgtttactattgaacgattatctcctctcatcaacgaatggcaccttgacatttgtcaaagtgctgctgatgatccttttatcaaaaaaagcccctttcaaatcgaaaaggagcagaccaacatacttagagaaattgaggaacggcaggactttttgcaagcacacttagcaagactttagtcctttctccattaaaaaaggccgcagcaaaaattgtcgcttttttagtcaaattgacgaaaggcaaccttttgagccaaaataggttatactaacgatatcctgtatttatatcaaaataaaatctagaattggagatagcgtaatgaacagtaaaattgaagaaatgaggatcacactaattgaaaccgcacaaaaatacggcatgaattcaaaagaaacgattcaatgcagccaagagctggatatcctgctgaatacccggattaaagaagaaatgatttttgggagatatcttgaaaactcccgtatgtaaatcattttctataacaattagaatacaccacatttaactccgatttttgctcagcacttctgagatatacctcagggcgagaatgtgcccgcccaaaaatcgaataccgcagcacgacatactccaaaaagcattctacacgcaaaaacaccaaagaaataaacaaaaatcaccataggcggatagcggcatccttcgccgcatttccgctcaatttatacccaacatcctcttttgccatgtttaaacataacggcccgaaaaaataaaacgctttcacaaagagccgatatgtccccttaaaatttctctcacacatatgtgcgtttgtcataagctatcgtgaatagcccaattgaaatcggaattgtcatttcactttacctgtctttttttaatttttcaacaaaggatgtgctcgtatgccggccattgtcggagcgtttaaaattaatgcgattggtacgagcggagtcgttcacatcggggactgcattacgatttctcctcaggctcaggtcagaacgtttgccggtgctggcagctttaataccggcgacagcctcaaggtgatgaattatcaaaacgcgacgaatgtgtatgacaatgatgcggttgatcagccgatcgtggccaatgcgtaaaaggagtgaggctcatgaacttctatattaatcaaaccattcaaatcaactatctccggctggaatcaatcagcaactcctccattctgcaaatcgggagcgccggatcaatcaagtcactgtcaaatttgtataatacaggaagctatgtagagccggcaccagaagtttctggctcagggcaaccgctccagctgcaggagcccgacacaggttcattggtcccgctccagcctcctggccgttaatcatatgaaagaggtgaagaacatgtatgatcaatctgtttcctcttacctgcaaaacttgaattccttcgttcagcagcaggcgattcacattcagcagctcgaacgtcagctgaaagagattcaaactgaaatgaatacgatgaaacagcggccggccactaccattgagcgtgtggagtataaatttgatcagctgaaaatcgaaaggctcgacgggactttgaatatcggtttaaatccgactgacccgaacagcgtccaaaactttgacgtcagccagtcgacaccgcaaatcgggatgatgcagcaggaagagagcgctcagctcatgcagcagatccgccagaatgtcgacatgtacttaaccgaggaaatcccagatattttggaacagcttgaaaatcaatatgacagcagacttgacgatacaaacagacatcatgttattgaagacatcagaaaacaaatggacagcaggattcactattatatgtcccatatcaaaaaagaagaaaatacaccgcctgcacaatatgcagaacatatcgctgagcatgtgaagcgtgatgtcatccgcgctgtagaacactttctggagcatattccatcagaaatgaaaggagatgagcaagcatgatctttacagtcatcaaccgcagcttggaagtcggggatattcggatgaacggtgtgtccagttcctccgttttccacatcggagacactgaatccatctacctgtcttctatttttgatacaccgcctgaatctcttattattgggccgtttgctccgcttgcgccagaataatgcttaaacgcatatcgcgcatcagactagttaagtttaattctctcgggatcgcaagtgtgtttcaagttggcgacacaaatgaaatcgatatgagtgtaaaagtatttgctgtgcagcgttctctgtccacgttttaccataatgaaggctcatttaacaaaaaggagtatcagatctttcagcagcaggccgtgaagccgctccccgaaacaggtgtacaaagcgcgttttgccacgaggtgccggctatttatgttcgcagcatcaaaattcaaggggtctcagcctcttctgttttacatgccggatcagcttcgcttattcgcggtgatgcgagactcaaacatatcagacagattcagtctccgcgctcacaatcgcccgccaagaacatataataaacagagacttcgataaagggtgtcgtttatgccagcaattgtcgggcctatagctatcaattccatatcgggcggagtcgtaaactttggtgattccttttacctttctccgaaaagctcttcaaaatctgcgctcggttcgggagcaggaaacacgggagatttccttctattaaataatgcagtcaacgcgacaaattatatagaccccgatgtcaacgatcaggatatggttggaaacggataaaagcagccgctctgcaaagagagggctgctttttagtcattttttcttttttcgttcatttgatttcttagttttgatcagcttctcaggcggctgttttctgatccatttgacaaaccgggcaagctctggatcgcttctgagttcagccattccatttaaacgtacagcgagctcttgattggtatataaggcatgaatctgtttatgacaaggaatacagagcatcgctgtcggcaaaaacgttccgccttcctctttcggtgtaagatgatgctctgtcagctggacatcgctccggccgcacagctcacatattccggcaatctgctttgccatatccgctcctcccttacatcaactcaagtgatacccgcgtaccgcggccgctcggttcagccggatggacgatcagctttttcggaagccgtgcacgcagttcctgcacatggctgatgacaccgacagccaggttgtctgactgaagtttttccaaggccgttacaaccgtatcaagcagatcttgatccagtgtgccgaagccttcatctaagaaaaagaactgcagcgggtattccccccgaagctgaatctgcgcagacagcgcaagagcaagtgaaagcgaggtgaggaaggtctctcctccagacaaactggaaaccgggcgtcgtacgcctccattcgcgtcatcccgcatcacgaagccgccctcagaatctacttcgatggcatagcgctgtcttgtcagcatactgagtcttgctgaggcgtccctcgcaacgctttcaagctgctcctcagctaaaaattcgacgaaggtattgcctttaaacacagcttgcagcttgtccagcctgtcgatatgcatctgccattttttcagttcagcttcaatttcattaaaccgtttatgatggtcgcgaatgacagccagtgcttttgcggccgcgcctttttcctctatagcagcgccaaatgcgtcctcagcttcttgtaatgctgcaacggtttcgttccattcgctctctgataatgctctgccggcaagtatctctgctactcgttttaagtttgcagcattttgcttcagtttatccataaactggtctatgccggttttcatcttttcaagttcatcagctgggatgagactttgttcaacctcctcagtccgggtaatggaggtgttttttgtatgctcaagccaagcagcttttgctttttccaatctgcccttcgcctcttgaagagtgagctcgcttgcagaagcgcggcttttcgcttggttgagcttcatttgggcgctttgcagttcttcatataaagattgttctttttcctttaacagctttagatcctgctggacagagcggagtttgatttgaatcgaatctccttttgcataatctccgagttcgtgctcataatcagctatcacgctcttgatgcgttcagccgcataatgaagctccagcttttcccgctcaagccggtgtcccgattcccgcagtttttccttttgtgcttcatgctcagcaagaaacgcgatactcttctcaattcgtttttcacattcttctgcagcccggtccttttcttcaatggcttgctgccatttttctgcttcgtccacagattgattctgaaatgcttctttaaacatgttcagactgctgtccattgaggattgaagctcactgatgatgctttcaatacggtcggcttctcttttttcaaaaccgattttttcattaagctgctcggccttttttaaagactcctgataggcgccaatcatttgtgccattcgtgtcttaacagaaagaatgtcctgcttgattcgtttccattcaaatttggcagtttcaaatgcttcatacaccggctgatgttcgaaggaagctgccgcttcaaggttctgtgcttgaattgtctgcaaaaacggacactgttcaataaagcgcgcggactgttcttcaagcataattttggctgaaagaatctcctggctgagagctgcagcttccgtcaataacacatctgtccgtttgatgtcctcttcaagatggctgtcggcttcatacgtttcatgtaccgaggcagatggatcatgatcggttgaaccgcataccgggcaaggctttccggcagtcagcttttgggctaactcttttgtcagcagtgccacccttgctttttcacgctgtaagtgaagcgtgtgttgactctttctagcctcttccgtcatacgtgttaatgagcgttccgtttcgcacaccaaatggtacacagtttgaactgcctcatatgcctgaatgatgttgttttcttccgcttccgtcttttgaacgagtgtattcttctcttcattcatcttctgcagcacgaggttcaattcttcacttcgttttttctcttttttgatttgttcctcggtttgtctgatgcgcaatgccatctctgcggcctgctggcagctttttcgctcatcggatgtcacctgcagggatttgagctgctgcttcaattctgtctgtctgttttgccctcgtgtcaggcggtctgttacggtctctaattcattcatgacagattgaagagcctcttctttctgccggaggtcagcctttttgcgctcttcctcttgcttggcctcactcagtttgatttcgatttcctgcaagcgtgaaagctgttcctgtttggctaaaagctcaggctctttctcgcttttatgctggcgccacgcttcatactcttcatgtttttgctgaaagaaagctgtccggtctgctaaatccttttgggctagcgtttgttccttttcagcttgctcctcatgctggatcgcttctgcgtaccggtccgcatagggcttaagggctgctgctgtttctgcttccagcaggcgtttttgcatgctgtctatatgcggctgttcttctgcgagacgtttttcctcttcttcataagtggatttttccttttggacattccatatctcctgatgctctgtaaaccgctccttcgcctgatcacggttcttcctcatcgcttccagccgggcttcagcttgttcgagaaccttttcagcctgctccactgcctctgagctcgcctcaccgagaccggactgttcagcaagcatttcattttttctcgcattggcttcctgcgcctgccgtctcagctttttcacaagcctgtctccatattgctccaaattaaataaacgctgaagcatatgcctgcgctctgccccttttaaagacagaaattcagcaaatttcccttggggcagcaccaccgctctcgtaaaatcgtcgatcgtcagccctaagagctcctccactcttttattcacttcgctggctttatcagccagcaccgtatgctcgtccttgatttcgatgaagcggcaaagtgccgtttttaccttcatttcatccgttctcttaaacacacgctcgactttgtatgagatttggtgattcgtctgaagcgcaaaggtaaaggacacagacagcgtatcttcggcgtgatttaagattccgtgcgtattattcgccgcccgttccacctttccgtataaagcaagcgtcattgcgtcgagtatagaggatttaccgcttcctgtcgggccgaaaatgccgaaaacaccggcaccggaaaggccttcaaaatctatcgtctgctcctctctaaagctgtggagccccttaatgcttaaggcgatcggcttcatttcgcatcctcctcttcaacgcctgatgcaagctctaaaaacagcttcaccatttcttcatccggcaccgcaccgccagtttgtttttcataaaatttcttaaagcggtcctcgattgagacatgtttaacctcgatccgttcccggtctttgttctgttcttcaaaaaccggcctgatatggataaagcccgggtgcgccttccgcagcctgtgaatctcttcaagtgacagctggtccgcgacacggatttccaagtcaatccaagcattctgatctctgccttcatccagccagctgtacacctcacttaatccatttgccgctttccacttcacaagtggcttgccgcttgataataacacctcttgccaagtggcctcttccccaggctttgcgtccacaatcgtcactgatttagcgtagcccgcttcagaaaagctgtaggcgagcggagatcctgaataacgcgcaagcgtccgcgcccgcttgatcgtttgcgggcgatgcaaatggccgagcgcaacgtaagcggcatctgccggcaggctttcagcagccaccgtgtatgcaccgccgacttcaatcggccgctctgaatcggtttggtttccgcctgccacataaatatggctggcggcaatcttcactgcatcggtccggaaccggcttgtcatatgctcaaacgcctgcctgattttcacatcatagtgatcacggagcagcttttcatcaaacgtatcggatagcacttcatttaaccgcgcttcagatgggtacgccagcgctccaaccgccaaaagctctcctgctgaaggcacttcaatatgaatcggctctgttgtcggataaccgattaaatgaatgccgttttcatgtgtcagcggtgaagcggcggacaaacggtcaggattatcgtgatttccggcaatgacgacgatcgggcgctttcctctgtcgctaagcgcagacaggctttcataaaacagctgctcggctaaagctggcgggtttacggtgtcaaatgcatcccccgccattacaatggcatcgatctgctcatcctttacaatcgtattcagttcatccagcacatcggcctgttcactcagcctgcttcttccttcaagcgtttttccaagatgccagtcagccgtatgtaaaatccgcaaatgctttcacctctcttttatatagaaaacgagacccgctccgcctgaaattccggagcttatggatctcgctataatgtcagaatgtgccctccgtcaaagaaataaagcgcacatccctttacctttgtttttgcaatttgctccactgccttcgtgtacagctgaatttgcgtttcatatcgtttcttcaagatcggggccgctccttcaaatccatgctggaatttgccctcaatccggtccgacttataatccaatagatataatccgtcctcagtttcatagagacagtcaataataccctgcactaaaagcggctcatctgcctcgtgtgcatcaggatagatctccttggccggaagcgctaagctgaatggtatttcccggtccttccacttagcaccgatcagctgtccgccgatttctgtatggaaaaattgcacgatttcttctatatcaatagcgtctttttgttcttcagtgagaagctctttttcataaagcctgtgaaccgtctgctcagcttcttctatcgacggcacatgtgacagcgggatatgctgcataaccgtatgcatggcagtccctttctctgccgctgtcaggccttttttcatcataaaagcgggacgtctgtacagaatgcttccatcagccggttttacaggggccctgccgctgtattcatcctcgtactctctttttctcttgatctcagaaactgattgctttgtccgaatttgcgtcacttcttgatgcgggtaggtccagctcagctgctcgcgggctttttcatcaaacgcaaacgagccgggaactggttcacctcggcggatcgcttctaggcgctcgcttttttcttccattctttcttccagatcatcatcaagcaaatcataggaatggatcatttgaacggcaaaacgagccgggtgacctgagatgtcagcgtgtgctggcacaccagccaaatcccccaagtctctgtgcctggcaagagccggcccaatgaaatctagatacgttctcgcctgatagcggtcaaattccggcagaagccaatcagtttgggacgcggatgcctgccattttgcaagctgtttctgatgatccttacatgagccaatcagaaacagcttttccttcgctctcgttaatgcaacatagagcacacgcaattcctctgacagcagctccctgcgcatttttttcttcatcgcaatgagcggaagtgtcggatagctgatgcgtaattgcggatgaatatacttcgtgccaaatccgagctccttatccagcaggtacgatttgttcaaatccatcatgttgaaattccggccgagacctgctacaaacacgactggaaattcgagccctttgctgctgtggatcgtcattaagcggacaacatcctcctgctcgctgagcgctctcgccgtaccaagatcatcgccccgctcctgcatgcgttcgataaaccgcaggaaacggaacaagccgcgaaatgccgttgattcatattgacgcgccctgtcataaagaacacgcaaattggcctggcgctgttttccgcccggcatgccgccgacataatccatatatttggtgtcgcggtacacttcccaaatcagctcagatactgagtggtttttcgaaaacgcgcgccatttttgcagatgtccgtaaaacgtatttaacttttgataaagctcatcgctccggtcaccagcagccaggtagtctttcatcgcctcatagtacggcgcttttttattttcaagccggatcaaagacagctcgttttcatctgctccgacaatcggtgagcgcagcacagaggcaagcggtatatcctgatacggattatcaatcaccttcagcacagaaagcgcgacggcgacttcgaccgcttcaaaatagcctgacgttaaattggcgtaaaccggtatgccctgtgctctcagctcctccatgatttgcggagcccacggcatcgaacggagcaaaatcacgatatctcggtattgaatattgcgatgtgttttcttttttccgtcatacaccttaaacggcgatgaaatcagcttacgaatttccttagcgatggcttttgcctcaaactgcaccgtttcaagctcttctgcttcctcgcttgcatccgtatcttctgcgttgtcgatcagcagcagctctgtttccgtctcgtcattgtccggatacgctgcaccaagcttcagctcagcctgctcgtcataatcgacctcaccgattttgccgcccatcagctgtttaaataaaaagtttgtgctgtctaaaatatcagcccggcttcggaaatttttatttaaatcgattttccgccccgtgccttctccgctctctgtaaaccgtttgtatttagagaggaaaagaagcggctccgcaagcctgaatcgataaatcgactgtttgacatctcctaccataaacaggttaccagtctcctccggaccgcttgtgacgagctgcagaatcgattcctgcacgaggttggtatcctgatattcgtcaacgagcacctcatgaaactgttcctgataaaaccttgcagcctcgctcggctcacgttcacctttgtcattctcagctgtcaaaatcgctaaacagtaatgctccaaatccgaaaaatcgatgattgatttttcctgtttcgcagcttcgaatcgttttccatagctgatgacaagctgtacgagcgtttcaatgacaggcttcatctcggctaggcttttcaagtgctgttcaggacttcgcgtgaagtagtcggttttgagcttttcaagcagtttttttgcgccgttcctcaaatctgtcgcctcatcaaggagcgctggatcgaactcatccccttttactgctttggcacgcttaaaagagacggcgggcacccgcttatatagttcactgaaatcgtcctgatgctgaatcagttcatcaatctgagcaagatcatcaagaaaattgtcagcacgcggcgccgggccgcccggcgctttcgtcagctcaagcgcgcgcaagagcttttccttcgccccgttaagcaccattgcaatatcttctttgacatattgataaaacggcagctcctcgatggcgctcttttctgatacatcatacaaatgaacaaagctttccagccacgcctccgggttgggatgggatcgggaatactcgtacacctgtttaacgagaaattgcagatccagatcatgccggtctgtcgtatagcggtcaacaagctcaaaaaacgccttttcgccctttgcgtattcgtcttcaaacagctcgtcaagcacttcatccccgatcagctcgccttccgtctgatcagctatccgaaagcccggatcaagatcgatcaagtagtaatatttcttcagcacttgcaggcaaaaggaatggagcgtcgaaatgctggcccggtttaaaagagacagctggcgtctaatatgcagcgagccggggcgctgtacaagctctttttccaaggcttctgcgattcggtgcttcatctctgccgctgaggcgtttgtaaatgtcacaacgagaagacggtctacatctattgggttttcctccgcggtgattttccgaatcattcgttcaacgagcacagcggttttaccagagcccgcagccgctgccacaagaatatcctggccggttgaaacaatggcattccattggtcatctgtccatgtgctgtctgccggtttaggaatgttcattgccatccgcctccttttttatccactcaagtattgtcttgtccttttcagcctttaatgggcgatactcgttttcttccagtgattcatcaaattggcatactgatttgaacgcacagtatgtgcacggcgtcttgttcttcattttgtacggctcaatggatacgcgcccgtcggtgatttgttcgcccgcttcttggaaggtgcggcgcacatgctttgtcaaaagatcaaattccttttcaccgactgctgctgagtctgatctgagagagccgtcttttttcaagccggcgtttatgatatttgaacgtccctcttgaagggttgtatccatgaggcgaaccacttcctgatcaccgaggagcaagcccttcattttaaatttcttaaagatctcctgttcaatctcgtcaagcccaagcgggagattagattgaatcatcgggtcatgaatatggaaatacagcactccggcaggcgtcgccctcatcccgagccagtcagctgaatgtgtaatcgataaatcaaggtacgtcagcatttgcagtgccaatccgtaatatacttccgctaagtcaaggcctttgtcgcttgatttataatcgacaatcctgaggagcaggccttttgagctttcagccttatcaacacggtcaattcgcccgacgagttccatcgtacagccgtttttcagttgaaaggtcagcggcggaagcggcccttttcctccaaagcccagttcaagcccgatcggtacgaatccgctcgctttcgcatgctcgcttaaaatgccggacacacgtgtcacaattttttgcagtttttccttcacataataatgccggtttgagctgagcagaatttccttttgcagtttcggtgccagccgctctaccgcatcataggaaaacagctcgcactgctccttcgttaaatcgcgccaatccagcttttgctcacgcagcctgtccgaaatcagctttaagctggaatgaaacagctggccgatatccggtgcttcaagcttgaagaattgccgttccttcaaatgcagcccgtgtgacgcaaaatgggaaaacgggcatgcgttaaaggtttccattctcgatacactgccctgaatacgttcaccatagagctgtctcgacacgctgcgttcaagctgcttcacttcattccggaaaaacaggcttgagaacagctttttcgattgcagcctgtcctgctcactcatcagcacattgtacgtgctccaccagacgtcgctgatgtcgtattcccgagtccataacctgagctggctcgcggtaaaggactgtgccacgcttttattcacaacatacatcagctgttcctcatcgctgacctgttcaggttcatttgttaacaggcgctccttatgatgcggaaacagttcttccagccgcttaacgatcatcgacggcaaaagcgtttttccttccgcatcagcaatcggatacgatacgtaaagccggtcagacggacttgaaaacgccatgtagatgaggaagtgctcatcaagcaaacgctctcgtccgcctgaggatagctcaaccccaatcgttttcagccattcccggtcatcatccgacaggaccccgttttcatcagggcgtgccggcagaacgccgtcgtttgccccgagcacaaaggtgcaggaggtgccatacattctggacaaatccatattgccgacaaacacctggtcaagcgcaggcggaattagagaaaatgtaagcgactccgcgccggcttctatcatttgctgaaacaaatcaagagaaatctcatcatctcccatcatttcaacaaactcctcaagcagctgaatgactgcgtcccacgcctgctgatgctgctgcgcttcaatgattctgccgtcatcctcagcacgctgcctttcctgatccagcttcagcggcacatccgtctcttctaaataacgatagagcgcctccgccttctcttgaaccgtcttcgcttttttcatgcgtttttgaagctgaaaaagcggcggaacaatccaatcgcgggtgtcattcaacatgttttccatttcgatttcctgatcagtctgcgcaaaatcatcatccaatgacacaaaacgcctgtattggaaccgatcgccctttgtccagcggtcgcctttaataccataggcgatacagtaattttcgagctgatcgacctgttctctcactttggccttcggttcattgagcgggaatagcagttcggttttcacgcagcgaaacaccgcttcataacgccaattccctttcagaacatcaaggctcgaccggataaattcaattaacggatggttcagcatagatgcttttccgtcaatgaaataaggaatctcgtaatctgcgaaaacttccttcaccatatccttgtagtcttccggctggcgcgcaagaattgctacatccttatagcgatatcccttctctctgactagggcgtgaatttcccgagcaatgccttccagctcagctcgtctgtttgcggcctgcatcacagtaagggcttcttgtttttctgcgtatggaatggccggacgcgcttcatactgtgcctctagatgcgccaattccggcgtctttgtatgccgctcagtcccgctcagctctttatacgtaatgtccaaattcagttccttcgccttctgatgcaggcggtaataggttttccccgtcattctgaacaattccagttcatgcggctcccgctcatatgacggcttgtccgctgtgagcgaaaacgtgatatgctccgcatgaaccataagctgctccaacaccctgaattcctgcggggtaaactgataaaagccatccacatagatatgggcgccttttatatcttccgcaagcgggatatgctctgccagcaatgtcaaataatcctcagagtgaagatattgatctgcgaggcttttttccatttgctgatacagaattgataagtcatggagcttttcagataaaacacgttctccgcgatactcggaagccgttccgctttccgccatccggcggatatcctccggttccagacaatagcgcttaaactctgtcagcatccgctcaacctgtgcggtaaacccgcttttgtcactcgctttttgatagactttgaactcctgtttatgctcctcaatgagcttccgcaggagcatttgtacgccggtgctcgtcagaaacggcctgctcattcctcccgtatgctggaggacgcgccaggccaatcgtgaaaaactgaacacttgagcgcgtatcatcccgcccatatctggcgttttagcaagctcgtattccattaaaaacgtcatttgatccgggactagaaaaatgatcggcttcccgaatggagcccggcgcaattcatcctgaatgctgttgatgatcagcttcgtttttccactcccggacctgcctactaaaaactctgctcccaaattagaagacccctctctttttatctctctatattttatcgaatgttgacgaaaatgaccaatctgatctattggtaaaaacggccttttcacatataaaaagctgattatctccgcacatctctccctgcccaacatatacttttacagaagcccaattcctaagaatggagttgaatccccttgcattacagctactatccctatccggtgccataccgggaagatcctgttttgattcggaatttgcagaaggccatcaacggagaattcagtgctattcaatgctaccgcaagcttgccgaactcgcccacagcgatgaggtcagaaaacagattgaagaaatcaggcgtgacgagattcgccacctccgtgaattttccacactgtatggttcaattaccggcaaacacatcatgccgaaacaaacggaagaatgcccggacaatttcacaagaggactggacgccgcttttaaagatgaacaagaaaccgtcgacttttacttgcgtgcggccgaggaaacgtcaaacttaaaagcgaaaggcgtctttacgcgcgcagcacgtgatgaacaaaatcacgctgtctggttcctatactatctgatggaacgttagatatacccattcagggtatatgtacatatccccttagctaaaaacacactcccctgtttttttcaaatgcagccgtgaaacataaaaccatatactgtcatacagggggaatcaaccatggagcaatattctgaggcttgtattgaggcttgcatcgattgcatgaaggcttgcaatcattgtttcactaaatgcttggaagaaagcgtgcagcatcatctcagcggatgcatccggcttgacagggaatgcgcggatatttgcgcgctggcggtcaaagccatgcaaacggacagcccgtttatgaaagaaatttgtgcactttgcgccgatatttgtgaagcatgcggcactgaatgcggaaagcacgatcatgatcattgccaagcatgtgcgaaagcctgcttcacctgtgctgaacaatgccgcagcatggcagcgtaaaaaagagggttcaaaaaagaaccctctttttatttggacagccatacggagtacaaatcaatccatccctcttcatcaagcaccaggccttttacatttttacttgatgtcacctggagcacattttgatacagcgggatcgcgttcagctcctgtatcatctgccggtcaatgtcacgcaggatgttgattctcgaacagcggtcaggcatggaaaacatccgctctgtcattcctgagcaaatctgtgtcagcttttcagatagatgctgatacaagaaactgttctccgacagcagcaaatgcagaaaaccaaactcgctgtcttgataaaacgtcgcactgtcatgaatgatatccgccatctgcacgatttccggccgtcgcagatcagcagcatcacagaattgaagtgtaagcctgataccgtgctgggcgcaaatattttgaatccattcggcgtcctcacgatgatccgtttccgaaaaggtataaagcacgattgtttcgccctcgtatccgctttttttcaacaattcagatggcgaaacgccctcccactcaaaaggactcggatgcaaaaaggacgtaaccggaattcttcggtgccctcccgcttcacgaacgagccgttcagaggaaatcagcagccggagcgcttttctaaagcttcggtgctgaagaggccccttctttttcagattaagcgacaaatactgaacatgccgctcatcaaagacagtttgctgctcaggacatgtttgtttttcttgaatggtaaaaccgttcatctctccggcttgctcagaaaacacaaactcaacgcgatccaaataggggcgtcccttgaagtagcgctcattggcttcaagcacaagcatcccgctatgttgctgattcatctgaaaaggccctgttccatttttcccgccgccctgttctgccggcagtatggacagccgttcatcacaaagagcatacggcaaaagcgcattcggcttatcgagtatgagctccacacaataagggcccttttctaagacttgtttcactccgtgcagaagccatttatacgggttgtcagccagttccaaaaagcgctgaaatgtaaacgcaacgtcccgcgatgtcagcggctgtccattatgaaataacacaccttttcgaagaaaaaatctccattgtttttttccgacctcttcccatccatgaaccaaatgaggcttcggctcctgcatatccgaatcaaacgtgaagagtgtatcaaatatctgtttgacgaaatggccctcagaccgcaaaaatatttggcatggatccaaactgctgacagattcaggcgtgatgaacagccgcaggacatccttcgccccattctcgcctgtctccgtcacaaatccgaatacctctgatagccacatgttatattcgttttgaagccctggaaacgcggactgatactgctgaagcagctcctttgcctttttaagctttcctgacatggtatattcctttgcagtttgaagaagcagttcctcaggcctccgaagaaacgcgattttagatttgcggccgcgccccgccccgctttcccggataatccaattgctgttctccagcttatgtaaaatgagctttgcatttctttctgtacaaaataaacagtcggcaatctcagtgagcgtcatttcgttcatttgcccatactcggcgcagcctgtttttacaagcgccacgtagtgctctatcagcttcaatccccgcacctcccgacaaaaggggaacttttatctcttcttttcttcactttttgggccgccgccccttctatacactactactatatcaaacagcgaaaggcggcgatcacatgttgaccagttttcactctataaaatcgagatataccgctcccgttcggctccgctttttcggcgaattgctgacaagcctgacaggtgcaatgatgggaccttttatggtgctgtatctgcatgaacaattaaacggcagtatcatgatgccaatgctgatcatcagccttcagccatttgctgatattttcctgacgctcgctgcaggacgggtgacggatcggcttgggcggcgcacagcgattttgaccgcattgcttcttcaatcagcggcaatgacagggtttgtatttgctgagcatgcgtatgttttcgctattctctatgtcatgaatggcatcggaagatcgttgtacattcccgcttcccgcgcccaaatcgctgaaagcacgccggaaagcagacgttcggaagtgtttgcggtcatcaatgcgatctattcgacgggtctgacggcaggaccgctagtggggatgctgctgtacaatcataaccccgtgtggatattcgcattagatgctgcagcattgtttatctactttctgatcgctgcactgaaactgcctgagacaaagccgctacacccagctgttaccccgaaaatgtccgcgagctttacaatatacaggcctgtcctgcttcttttgctgctttctctccccatcagcatgttatatgcacaaacagaaacaacatacaggctgttcagcaaaaacatgttttctgattatctgtccatgctgaccatctattcagcagcaaaagctttattcagctgtgttctccaagtacctcttgtcaaagggaccgaaaagctttcaatgaaaacgatcctcttcattacttatatttgctactcccttgcggcagccggctttgcatgctcaacctctctgacaatgcttttagtgacggcagcggtgatgacggttggtgaaagcatcgggctaacccacatccagaccttcatatcgaaattggcgccgcctcatttgctgggccggttttatgctgtctatggtctgcattgggatatatcccgctcaatcggaccgctggcaggcgggctgatcctgacatcatttggcggagaagtgattttttacgctcttgccgtgtgtctgctgacagcgggtttatctctgacttacacaatagaaaagctcgaacacaaggtcataagaaaagtgaatcgcttatagaaaataattcataatttctttatcaacaaaaatatactatagtaataaatacattcactacgtgaacaattggagtgttacgtgaaaaaggaagaagggttttacattgaagaaagacgaaaatctcctcaaagatctatggtttatcgcaatcagtgcagccggggggtttattctttcattaaccggaatatcaattggatggatgatcggaacactgattgtcgcctgctgcctcgccatgatacggccggcatggctgatgatggcaccagaccaaaaaggaattaaccgacgatggctcgccctcgggcagatgatcctcggcatcgaattgggccaaaagctgaatttatccgttctctctgttctcaaagaccattggttttcagtcggcgttatgctgatattgtctatcctgctggccatgctgtcaggatatgtgctttggcgtttcagcaaaacggatatgatgactagctttgtcggcaccgctcccggcggactttccgccatgccgagcatcgcacaggaagtaggcgccaataccgctatagtcagcctcgttcaaatgatgcgtgtgctgctcgtggtgctttccattccgtttttagtcattctgatctatacaaaacaagatcgtaccgcaagtgccgcagcagagacgatttcttctgcaacgacagattttaggctcgctcccgttttgtggaccgtcattcttattctcgctgcctggggagcttgcaaagctgcgaaatttttaaaatttccagctccatggctgctcggcagcatgctcggtgtagcaattgtacatgttggcggagctgcggtgacagggcacgacatgacggcatggtggttgtcacaagctaaccatgtatcacaagtatttctcggggcaacgatcggctctaagatgtacaaaagcatgtttgccggcgtcacccgtattatcatcgtcgggtttgtctcgtccgtcggtttaatcgcagcaatgtttttgagcgccgtgatcgtttccgagctgacaggaatttcgctcatcacttctgttctggcatttgcgcccggcgggattgcagagatggcgacgacgtcagttaccttacatgctgattccacctttgtcgttgcggttcaggtcattcgcgtcattctggttattgccctgctgccgccgttttatcgcctgcttcaccatcttcatggtgaaaaaaaagacaaaaagagctcaatcagcggcagtagtgcctagttgaaaaaagggttcaagaacttttaattcgcaaaccatcgagatgaggaaatataagcggatatttcgttgttaatggatcagatttgaagtgagtgctgccagagggtgaaatgaaagaaataattgacgacttacgattgaaaaagaggttaaaatgaataacctctttttcttatataaagatataaaatgttaaagggaaatctatcgttacgttgattctcttataataagctttgttggcagtttaataattcttctgtttaaagaggcattacccgaaatggactcgatgattttcaacacagcctgttggcctaattctattacggggatatcaattgttgttatggtcggagtaacgacttggcaaatcaattggttgtcaaaaccaattacagctaagtcttctggaactttaaagccatttttcatcgcctgtttaataatccctgcggcgacttgatcatttcctgtaaatattgctgagggtctgtcctttagatcctttatcttatgaaaaacacgaaagccatcctcgatattaaacatttcgccgaatatccattcgcttctatgatgtaaattgtaatcttgtaaagctttcaaataaccctctttcctctgacattgagcttcgctatatggagtatcaaaacaaaacccaatttttttatgccctctttcaattaaatgtactacccccatgtatgcggcttcaaattcatcatacccaattatcgtgatgtccgctgagtgatgatattcattacataataagataggaccatactttaagaaaggggatatctgatcccattcattttctaaagtcccaagaataatgccatccacttctttatgcttcaataactctagtaattctagctccgtctgtttgtcataaaaggtctgaaatacaattaccttgtaattcttaaacagtacttcatgagagaccccttttattaattgagcaaaaaatggatggtcgatactcggaaccgataaagctatcgtttgtgtcttatttctcctaaaattccgagctaaataattgggagtgtagtcaagttcgttaatagcctttaagatcatatctcttttttctttcgacacataaggatgattattcaatactcttgacactgtggttttagacacattgcataattttgctatttcatcaattgtaggcatattttcccttccttaaaaaagttgttgacatgttaccgatttcagaaactaggataaatttgtaataaatttttagattataaaatcattggaggtactgttcatgcaaaaacaggttaagatttcaggtaaaagcaaagaaaacatgtcactattaaaacacttaaaaggtgacgtacaaggaaaagaacttgttattgaagacagtattgtaaacgagcggtggaaacaagtattaaaagaaaagatagatattgaacatgaccttttcaactatcaaaaaaatcgtgaaatcagtaaagtcccttttttgcctgtagacagattaataaccaatgatgaagtggaagatatcttaaatacattaactgaagttttgccaactggaaaatttacgagtggtccctatttagagcaattcgaaaaagttttatctacatatttacataaaaggtatgtaattgcaaccagcagtggaaccgatgctattatgataggtttattggctttagggttaaacccaggggatgaagttatcatgccggctaatagcttttcagctactgaaaatgctgtgttagcttcgggaggcgttcctatctatgtagatattaacccacaaacattctgcatcgatcctgacaaaattgaagaagcaataactccttatacaaagtttattctacctgtgcatttatacggaaaacattcagacatgcagcatatccgtcaaatcgcaaatcgttataaattaaaagtaattgaagatgcctgccaaggaattggactgacagacttaggaaagtatgcagacatcactacattaagttttaatccctataagaattttggtgtatgtggcaaggctggggcaatagcaactgataatgaagaactcgctaaaaaatgcattcaatttagttatcacggttttgaagtaaatgtaaaaaataagaaagtcatcaattttggatttaattcaaaaatggacaatttacaggcagcaattggtttagagagaatgaagtacctttcattaaacaacttcaaaagattgttcttggcggatagatacattacccaattagcagagttgcagaataaaggctatattgaattaccagaattaagtgaagatcatgtatggcatctgtttcctattaaggtaagaacagaagatagggcagatatcatgactaaattaaatgaagattttggtgttcaaacagatgtatattatccaatactttctcatatgcaaaaaactcctttagtacaggacaagtatgcaggactccaattggttcatacggaaaaggctcatagtcaggtactgcatttgcctttatatccgtcatttactttagaagaacaagacagagtaatggagggactgtttcatgttattaagcaagaaatcggagtataaaacgttatccacggttgaacatcctcaatatattgttttttgtgattttgatgaaacgtattttccgcatacaatcgacgaacaaaagcaacaagacatctatgaactcgaagactatctagaacaaaaaagtaaagatggggagctaataatcggatgggttactgggagcagtatagaatctattctcgataaaatgggacgaggaaaatttagatattttccgcattttatagctagtgatcttggaactgaaattacgtacttttcagagcataacttcggtcagcaagataacaagtggaacagtcgcataaatgaagggtttagtaaagaaaaggttgaaaaacttgtgaaacagctgcatgaaaatcataacattcttttgaatcctcaaacccaattaggaaagtcacggtataagcataacttctactatcaggaacaagatgaaataaacgacaagaaaaacctattagctattgaaaaaatctgcgaagaatacggcgtttcagtaaatataaatcggtgtaatcccttagcaggcgatccagaagacagctatgatgtagattttatccccatagggacaggaaagaatgaaattgtaacgtttatgttagagaaatacaacctaaataccgaaagagctatcgcatttggggatagtggaaatgatgttcgtatgttacagacagtagggaatggatatctgctaaaaaatgcaacacaggaagccaaaaacttgcacaaccttataactgatagtgagtactcaaaaggaattactaataccttaaaaaaattaattggatcatgaggaggaaataaaaatgaagaagataggcatcataggtgcaggtggtattgcaagagcgcatgcaactgctttatctacaataaaaaatgcagagttagtaggggtatatgacataaatcaacaaaatgcggaaagctttgtgaaaactttcggcgggaagtcatttgaaaacgtagatgaactaattgatgcctcagaaggtttaattgtagcatcaccaaacttttgccataaagaacatgctttgcaagcattaggaaaacataagcatgtattatgtgaaaagcctatggctatttctcttgaagaagcaagcataatgaaagatactgctgaaaggttgagcgtaagagccagtatgggatttaattatagatatttatcttacgtaaatatcttaaaaagcttaattatcaataatgaactaggtaacatactgtccataaaagtacacttcaagaaaaatagtgcacttagacgtaagaagtttacttggagagatgacgctaatagtaagaagacgagtggatcattgggggatctgggtattcaccttattgacatggtatggtatttgttcgagagtgatttcatcacagaatcagtaagggcaaagatgaacacaaatgtaaaaacaaaagaggataaacaggtacttgtagatgactatgcagaaatttatggccagctgaagaacaaggtatttgtaaatatcatcacatcaaagtgttctgtacctgaagactgtggttttagcattgaggtagttggacacaaaaaagagtttaaataccacacaggtaatcctcacgtttacaagctcatagatggcttgaacgtggtagactgcccagtaccgcaaagcctattaaacgatccgccaaacgagttttatggatgggctgattcttttagaagcgagttaatcaattggattgcatcaactcagaatgattgggttgagatcccttcttttagtgatggttttagatctcaggaagtattagaaatgttctttgagaaagacagcaactctcaacccatgtctgtttcagcagtcaactagtatttcaaagagagaagttactaaaaaagcaggaatttactttcctgctttttcatataggggtgtaatgaatgttaagagggacatatttatttggatatgctttcttttttacagtaggtattatccatatatcaacagggagtttgacaccatttttattagaggcttttaacaagacaacagatgatatttcggtcataatcttcttccagtttaccggatttctaagcggagtattaatcgcacctttaatgattaagaaatacagtcattttaggacacttactttagctttgacaataatgcttgtagcgttaagtatcttttttctaaccaaggattggtattatattattgtaatggcttttctcttaggatatggagcaggcacattagaaacgacagttggttcatttgttattgctaatttcgaaagtaatgcagaaaaaatgagtaagctggaagttctctttggattaggcgctttatctttcccattattaattaattccttcatagatatcaataactggtttttaccatattactgtatattcacctttttattcgtcctattcgtagggtggttaattttcttgtctaagaaccgagagtacgctaagaatgctaaccaacaagtgacctttccagatggaggagcatttcaatactttataggagatagaaaaaaatcaaagcaattaggcttttttgtatttttcgctttcctatatgctggaattgaaacaaattttgccaactttttaccttcaatcatgataaaccaagacaatgaacaaattagtcttataagtgtctcctttttctgggtagggatcatcataggaagaatattgattggtttcgtaagtagaaggcttgatttttccaaataccttctttttagctgtagttgtttaattgttttgttgattgccttctcttatataagtaacccaatacttcaattgagtggtacatttttgattggcctaagtatagcggggatatttcccattgctttaacactagcatcaatcattattcagaagtacgttgacgaagttacaagtttatttattgcctcggcaagtttcggaggagcgatcatctctttcttaattggatggagtttaaaccaggatacgatcttattaaccatgggaatatttacaactatggcggtcattctagtaggtatttctgtaaagattaggagaactaaaacagaagaccctatttcacttgaaaacaaagcatcaaaaacacagtagaaaacgtataaaataaagatactaatagacatatcgtataagcagtgcaaattcctgaacatcttgaatttcattcttcaagaggaaatctgatttacgttacagccttgaaaaagatagaaacaaagcgaaaaacacgcaccgcagtgcgtgttttttatttaaaaatgctaggaagccccccttcaatttcttctgacgacggataccattttgtcaccagatcccgaaacagccgttccgcaaaaagaatctcttcctcggtatagcggtcaaaaaatgacagaaaacgctgttcagccttctgatgataatatttgtgcaaactgtgcagcttttttccagcaggcgtcaatcggaagtagacctcctttttattatcgctgagctgtgttctgtgaaggaagcctgcgccgagcaattttgtgctgatgcgtgatacagtcgcttttgtcgtattcattttttctgctatcgacgtgacattaattggttcattgtccccgacacaggatagaacatgaatttctgtcatcgtcaattgagatttactcccgtgctctacatccagcttcctcaattcgtcagataaaaaggctttaataagcccctcccatttctcctgctgatgaatgagctccgcatacaattcaaaaagattgcgtttcgtatgatctgtgttcatcgggttttccatcctttttcattcgattgtttcttctatcataccgttttgttacagatgaaacaatcgaattgaattatactcggctggtgacggaaaaccagcggctgatccctttttgaatcacctcggaacaatcgggcgctgatgcatccaccgcccaggctacatgtccatcgggacgaatcaatatggtatgcacattccgcaacttttcattcggttctgcaagcgaggcggttaccgtacgtaagccttttacttcgatatgatcatcagcttcctgcctcaatgacagcaaaacgaatgtcccgttttggagaaagctgtacagccgttccgaattgccgtcggaaagaatcagcttcatgtcagggagccttgccccgttcaaacgattcggcggcatggtacgatcagcttcatatctgacatcgagcgcagaaatttgccccgctacatatcgattcacatcagggaaggccagcagctccgacatcatgcttcgcaaatggaggcctgcttgagtgaaatcgatcagctttgtctgtgcctccgtgtttctgaggagcccttccgctgccggatgccgctcatcatggtagctgtccaaaagccaagaaggcgcagagcctttgatggccgccgccagtttccacccgaggttcattgcatcctgaaggccgacattcagtccttgcccgcccgccggaaaatgaatatgcgcggcatcacccgcaagaaagattctgccgtcccgataccgtttcgcttggcgcgcggcgttcccaaaccgcgacatccacgaagggtcggttaaaccgaagtcagttccgcaaattcgcaggaggtcagctttcagctcttcctcagtcacaggcacatctttcggcgtttgtgtgcgataagggctgatcacaacgacacggtatcggtctggagataacggaacaatcataacaccgccctcttttgtgcaaagggacagcacacctgacggcggcggagaaaggagcaccacatccccaagcgcagcggtgacagtgctgtctgttcccggaaactcaattttcgcctgtttccggacggtactcccggcgccatctgccccaacggcaaacttgcttgtgatcgtccgtacactgccgtcccgatccttaaaaattgtttggaccgcttccccgttttgcgtaaccgccagcgcctcggcaccccgaaacacctctgttcccaggcttcgtgcatgatcttcaagaagcttttctgttttggactgcgggagcaaaagcgtgtaaggacagctcgtatccaagcctgaaaaatccagacgggtatccagcattgaaaaatgtccggtaggtatcttgcttcccttggatacgaaccgctctaaaatccctctcatctcaagaagctccagcgttcgggggtgcagcgtcaacgccttggaatgcggaacaggtttttcaagccgttcaatcacacatgttcccactccggctattgcaagctcagaagccagcataaatccaaccggccctcctcctataatcactgcttcatatttcatcatcattcaccactccttttgtttcatgaaaaacgaacaaaaaccaataaaaacggccctccagtcaaaaaaatatataaattttgttacacaggtaacaattttgattatagctccttacaaatttttcttcaacacatttttccaaacggcatacaaaaagacgcctcttcaattagcgtctttttattcggcatcagaaatcacaccgacaatatttttttctcttatcggaccaaaatgccggctgtcgaagctgtatatgcgattatctccaacgacaaaatattttcctttcggcaccttgcttgttcccgtcacatctttcaaagaaaaatcacccgttacatggctgccggcagaaacagatttcaaatgcttcaaaaatggctcagcaacctgctttccgttcacatacagctgatcatctttatatttgatcgtttcaccgggcaagccgattacccgtttaatcagcactttatgatcagggcctttaaaaaggacgatgtcaaaacgatggatggttttaaatcgatgcgaaaatttattgaccaacaattcgtttccttcctggaaggtcgggttcatactgacgccttctaccttgtaatcaataaagacagcatttttaacctgaatggcgagaacaacggacactacaccggcaagaaaccaaaaccgttttttcatgttactgtctccctccatcatgctcacgctgactggctcttacatgcagataccgctccacctttttgccgacataccataagacagtgatcaccaatacggcgatgaccgttcgaatcggctgtgtaatcagcgcgtgcagatcatatccgatgaagctgatcataaaaatcatgacaagcttccccgaggctgccgccaaaataaacggccgcgttccgatccttgacaaaccggcaacaacattcaccgcggctgacggtgtaaatggaaaacaaagcagaagaaacatgggaccgaagccgtgtctttccacccataacatcagctttctgacagacggatgactgcggataaatccaagcaattttctctgtccgtattgacggacaatcaaaaagacgagaatggaaccagcagttgatcccgcccaggataggatgaatccttcccacaagccaaacgagttcgtattcgccaccacaaacacgatcagcggcaaaaacgggagaaatgcttcaattaaaggcagcagcacagcaatgagcggaccgaaagccctatagctttgaaataattcagttaaatgttcttgtgtcaaataggataaaaaatgctccaacatttatactccttaccgggtttgtctatccttattctacacattatcagcagaaaactaaaaagttttggtgattttttctgtcttgaaacatttcaccagccgatatagaatacaaatagaacaaacgttcccttagaaagaaggagtcaatatgccaaatctgcaggaggaaatatacgatttaattgaacgggctctctttttgcccatggccattacgatttttaaccgtgatctcgccggaattgaagaaagcacattaaaattgaagcatccttataaacagcttatcagcgaatcattaaaaatagcacaaaaggatttgatggaggtcagaaaagaactgaggaaaagaaaaattgcaatccgcgagacggaacgcgatgaggcctttacactctatacatttgtcatcgacggttatgaagaaaaccatcgctattttaatccgcgaatccgtgagcaggtcagcgaattattaacatactatctatttgccccagacagactctgagccttttgaatcatactgcccgttccctcttcgggcgattcagagcattaatttcagacaattcacactatacaaacaaaataaatttatttataattcgaaccacagcctttcactccaaaaaatgacatgtgctgcgatatctgcgacatcattttcagtacgcttaggcttgtacacctcaatcctaaatagaaggaggattctatgaaactgattcacgttcttgccgctttaccctttatcggaatcttactcggcatcccttttgcaaataaggtgaccccctatgtgttcggcatgccgtttattcttgcctatattgtgatgtgggctcttttgacctctgcgctgatggcgattgtgtatgtcctcgacaaggaaaataaaaaggaggaagcagaatgaatgcagctctcatcatcatcttcggtgtcctgctcttgagtatttttctcggtatacgcgcccaaaaaggaaaagacatgaacctggagcagtggacggtcggagggcgcggcttcggaactgttttcgtcttccttttgatggcaggcgaaatttatactacttttacgtttctcggcggcagcggctgggcctacggaaaaggcggtccagccttttatatcatcgcctacggatgtctggcctacatcctttcttactggcttcttccagcagtttggacgtacgcgaaacagcataaactgatgtcgcagtctgattttttcacaaaaaaatacaacagtccgctgcttggcattctcgtttcactggtcggcatcgccgcactcattccctatcttgtactgcagctgaaaggcctcgggctgattgtatcggaaacctcgtacggcaaaatcaccccgaccgctgccatctggatcggcgctgtttccatcacggtttatgttatggtttcaggcattcacgggtctgcctggatatcggttgtgaaggacatcatgattctggttgtcgttctgtttttaggtgtgtatttgccaattcattactacggcggatttcaagacatgtttcagcagattgaaacggcaaagcctggctttcttacgctccccgaatcgggacaaagtgtggcctggttcagttcaaccgtactcttgacagcgcttggtttttacatgtggcctcacacgttttccgcttcgtattcagccgaaaacccaaaagtgtttcgtaaaaacgccatcatcatgcctttgtaccagctggtcctgctcttcgtccttttcgtcggctttgcggctatcctgcaagttccagatctgaatggcgcagacggggatttgtcgcttttgagactgtctctgcaagcatttgacccttggtttgtcggaattatcggtgctgccggactgctgacagcacttgtgccagggtctatgatcttaatgtccgcctccacactgtttgcaaaaaatgtgtacaaggtaatcgcgccccgcacgacagaacagcaagtatcggcgcttgctaagtttttagtgccggtgattgcgctgatttcggtgtattttaccttcaaaggcgggaataccatcgttacgctgcttttgatgggctacagccttgtcacacagctattccccgcccttttgttcagcctgctcaagcataatatggtgacaaagcaaggagctttcgccggcattattgcaggtgtcggagcagttacttatattacaatgacggaaacgacgatcggcactttatttccggctctgccgcaagccgcaaaagacttgaatgtcggcatcgtcgccctgcttttgaatatcacggtcatgatggcagtcagccttatgacaaggaaggcgaaaagcgctgcggccgatcaggcggcctaagcataaaaaaagcaatctggacaccagattgctttttcttatttaccgttcacaggcgataagatctttatcgcggtctttgtttttattggcatcgtaaagtgccttagaaacgtaaggcttgtacttcgtttttccgcctttgtttttcaccttcgatgtgcgggccactccgcctttgtatactttgtttagctccttgcagttcttatagaccttcacctttgttttggcttccgccacatggccagctccgtatgaaaaaccgaaaacgagaccgagtgacagcaaaaccgccgccgcttttttcatgacgattcactctcccaacacccaatatttagttgatttatagctcgaatttatcataattcatatagtcttatttgacaagataaatatggaagaaggctttgttttttcttgttttctttttccttcactattcaaactgccaaaacatgtttttctgcttatgctcaggggtacacatacgaatgtacaccaaacagaaaaggagcgttgctgatgtctgattcaaatcttacgaatcctataaaagcattttttcatgatgaatttcccgaacaatatcaagaaccgccaggcctgcaaaagaacatgaagcctgtccctgattgcggagaaaaaagctacaaaggatcaggtaaactaacgggtcgaaaagcgcttgtcacgggcggcgattccggtatcggccgcgctgccgcaattgcttacgccagagaaggtgccgatgtggctattaactacttgcccgaggaacagccagatgctgaagaggtaaaagagctgattgaagcagaaggccgaaaagcagtgctgatccccggagacttgagcgacgaatccttttgccaagatctagtcaaacagtcgcatcacgaactcggcggacttgatgtgctagcgctcgttgcaggcaaacagcaagcggtcgaaaacatcgaagatctgcctactgaacaaatctataaaacatttgaagtgaacgtcttttccctttactgggttgtaaaagcggcgcttccgtatttgccggagggagcttcaattatcacaactacctcagttgaaggctataatccaagcccgatgctgttagattacgcagcaacgaaaaacgccattatcggctttaccgtcggactgggaaaacagcttgcttccaaaggcatcagagtaaattcagttgcgcccggaccaatttggacaccgctgcaaatttccggcggacagccgacggaaaacatcccgaaattcggacaaggcacgccgccagctccattaaatcgcgctgggcagccagtggaattggccgatgtttatgtatttctagcttcagagaattcaagctatgtgacatctcaggtatatggcatcaccggaggaattccgacggcatagctttatgaaaggagctgccctgttcggtcagctccttcctatttttctaataccgttccccgagctcacgcaaaataaaatcataaatcatcttcgtccgctcttctttcgggtacagcataaattcctgtcttttcggcacgcggtggtcgattctgtcttggaatttggttctgagccacgctgttcggtatacctggttctcgaacgaattataagagatcggcagctccatcgttttcccattggaaaacgtcacttccgtatcgtcgaattcagtcgctttgaattcttttacatgcacatgggaaatccagccgcattggggtcttgtcgaagaaagtgtagggaataaaaagatttggttcgaagggtccaccatgatcggcggcttgtgtgaaatttttgtcacttcataagttcctgcttttcttcccgcatagcttgatccaaaaaatcggcagcttctgtcgacaatttgcagcggcttcatgtttacataaaacacgcaatctttttcaataattttggaacagattttgccgtctatttcttctggcagcacggcaattgttgcgccgttcacttcatacgattctaaaggtgcgtctgttttctgactcatattatggcctccatcctttttctgcaaaatttatactaataatctatcatctgtttttgtaaaacgacaggtttttttaacatttaagataaaatcatcttttaatgatatttaatggtactaaatgactagtaataaaccgattttactttcataagacttgccggtttacggcattttgcaggatatgtcgatagattgccaagtattagttgtctaaaaattataaaaatttattgattttttcgaccgttatccatatactataaaaaaggcattggggggattctttatgaaagagaaaaaatcgtacactgagctcatgaagtcccgcaacacgcaaaaaacaaaagaattcgatgtcacaatgacggatatttacattcaaatggtgctcgatgaatccttgtataaccgtcggcttgccatgctgacggaccaaattaacaaagccttggacgaaaaagataaagatgcgtttcttacgctctctaaagaatatgcagcgctcaagcagagcgaataagccaatccttcaaggattggctttttattatccgttcacaattgttccgccattgacgtgaatcgtctgccctgtgacgtatgtggaatcgtcgctggcaaggtatagatagcttggcgccacttcgaccggctgccccgggcgttccatcggcacgtctgaaccaaacacttccacgtcttttgcggcaaagctggccgggataagcggtgtccaaatgggacccggtgccactgcattgacccgtatgccctgctgaacaagcgactgggaaagggaccttgtaaacgtaacgatcgcgccttttgtcgctgaataatcgatcagcgttttattgcctttataggcggtaattgaagcggtattaataatagagctccctttttttaaatgaggcagcactgcctttgttaagtaaaacatggaaaaaatgtttgtttggaaggttctgatcagctggtggctggtgattttttcaatgctgggctggacatgctgctcagctgcattgttaaccaatatatcaatggatggaaacacttggcttgcctgcccgaccacatcattgcaaaacgcttcatccccgacatctcctgcaatcagcaggcattttaccccttccttttctacatactgctttgtttcctcggcgtcctgatgttcattcaaatacacaatgaccacattagccccttcttttgcgaataacaccgagacagcgcgtccaatcccgctgtctcctccagtaataatagcggttttgccctctaattttttcgctttcttcggcttatcaaaaaccggacgcgggtccatcagatattcaaaaccaggctgctggttctggtgctgaggcggtaatgttttctttttttgattcgccaatgaaatcactccttttcaaccttattatgttatgaacaatgcctgcttcctatgtatgaaaagatagaatatggaaaaattaagaataaatctgattggaggtataacggcttggctaatcaacattttgcaaaggaagcacctgaaacatactggaaaacatcaactgacctgccttcttttcctgcgcttcaagaggacactgaatgtgacgtcaccattatcggaggcgggattacgggaatcacaacggcatatgaacttacgaagagaggcttccgtgtcgttttgattgaagcaaatcaggttcttaacggaaccactgcgcatacaactgctaaagttaccgcacagcatgacatgatatacgacgaatttatccgccatttcggattaaaccatgcgaggctttattatgaagcaaaccaaaacgcaattgattacataaaaggcattgtggatgaacatcaaattgattgtgaatggatcgagcaagacgcatatctttatacggcaaatgaaaacgctgttcaaaaaatccacaccgagcatgaggcatacacaaagctcggaattgaaagagaccttatcaaggatcttccaattcccttaggttctaagctggcgcttgtcatgaagaatcaagctcaatttcatccgcttcaatacttaaaagcgcttctggagcaaattgttcaaaaaggcggccgaatttatgaagagaccgttgcgcttgatatcaaaaaaggcgaaaggcccgaagtggtaacaaaaagccggcacgccattaagagccgctttatcatatgctgttcccacttccctttttatgacggaggcggattatatgctgcgagaatgtactccgacagatcttatgtccttgccatcaagccgaagatcgagtatcccgagggcatgtatttgagtatcgatcagccgtcagtggcgctccgctatacggttgtaaacggtgaaaagctgattctcttcagcggagtaagccataaaacaggccagggaaaagccatgtctacacattatgaaacactgagacaactggccgaaagcaccatcggcatcgaaagcattccatattattggtccacccaagatctagtgacgatcgacaaaatcccgtttatcgggccgatgtcggaaaatgaggacaatattctagtagcgaccgggttcaaaaaatggggcatgacgtcctcagcagtcgcagccactttattgtcagaccttgtggagaaaaaagaaaacccatacgaaagcattttcacgccgtcccgtttccatctgaatcccgggttgcagaaagtgatttcctacaatgcagatgtcgccaagcatttgataaaaggaaagcttgaaaagcctgatgtccaatttgaagacatttcgccaggagaagggaaagccgtcaccataaacggcaggcgagcgggagcatttcgtgatgagacaggctgcctccatctcgttgatacgacttgtacccatttaggctgcgaggtcgagtggaacgacagtgagcatacgtgggattgtccgtgccacggatcacgctttaagccatctggcgaagttgtagagggtccggccattaaaccattaaaacaaatagatctcgattaaaccgttcattttaatgaacgttttttcaaatatttttcatctgcagcttcattcatgtttcccttggccgataaaaaagaaaaaggcttaaaaagccaaaaagtaaaaattatatttttcccaagggggatcattgtattgttatttaaaaaagacagaaaacaagaaacagcttacttttcagattcaaacggacaacaaaaaaaccgcattcagctcacaaacaaacatgcagatgtcaaaaaacagctcaaaatggtcaggttgggagatgctgagctttatgtgttagagcagcttcagccactcattcaagaaaatatcgtaaatatcgtcgatgcgttttataaaaaccttgaccatgaaagctcattgatggatatcattaatgatcacagctcagttgaccgcttaaaacaaacgttaaaacggcatattcaggaaatgtttgcaggcgttatcgatgatgaatttattgaaaagcgtaaccgaatcgcctccatccatttaagaatcggccttttgccaaaatggtatatgggtgcgtttcaagagctccttttgtcaatgattgacatttatgaagcgtccattacaaatcagcaagaactgctaaaagccattaaagcaacaacaaaaatcttgaacttagaacagcagcttgtccttgaagcgtttcaaagcgagtacaaccagacccgtgatgaacaagaagaaaagaaaaaccttcttcatcagaaaattcaagaaacctctggatcgattgccaatctgttttcagaaacaagcagatcagttcaagagcttgtggacaaatctgaaggcatttctcaagcatccaaagccggcactgtaacatccagcactgttgaagaaaagtcgatcggcggaaaaaaagagctagaagtccagcaaaaacagatgaacaaaattgacacaagccttgtccaaatcgaaaaagaaatggtcaagctggatgaaatcgcgcagcaaattgaaaaaatcttcggcatcgtcacaggcatagctgaacaaacaaaccttctctcgctcaatgcatctattgaatccgcccgcgccggagaacacggcaaaggctttgctgtcgtggcaaatgaagtgcggaagctttctgaggatacgaaaaaaaccgtctctactgtttctgagcttgtgaacaatacgaatacacaaatcaacattgtatccaagcatatcaaagacgtgaatgagctagtcagcgaaagtaaagaaaaaatgacgcaaattaaccgcttattcgatgaaatcgtccacagcatgaaaatcagcaaagagcaatcaggcaaaatcgacgtcgatctgcaagcctttcttggagggcttcaggaagtcagccgcgccgtttcccatgtggccgcttccgttgattcgcttgtcatcctgacagaagaataaccatcaaaaaccggtctgccatacggccggtttttttgcgttcattatgtaaacttaaattaaaaatcagttgacataataattacctgcatttattgtataaccatatttgattactttttggaggatttcacatgctgaaattaatcgacatgatgcatattgcgattttcaccgcgctgatggcagtgctcggctttatgccccctctcttcttatcctttacacccgttccgattacattgcaaacgcttggtgtcatgttggcaggcagcattctcaggccaaagtctgctttcttaagccagcttgtctttttgctgctcgtcgccttcggagcgccgctgttgcccggcggacgaggcggttttggtgtgtttttcggaccgagcgcaggctttttgattgcttatcccctcgcttcatggctgatcagtttagccgctaacaggctgcggaaggtgacagtattgcgtctctttttcactcatatcgtattcggcatcatctttatttatctgcttggtataccggtacaagcttttatcatgcatattgatttgtcacaggccgccttcatgagccttgcatatgtgcctggtgatttgataaaagcggctgtatctgcatttctggcgataaaaatcactcaagccttgtctctttctgatacgatgtttacaaaaggaggatgacaatacatgacaattactcatacctattcatctactgccgaaacatcgcccggccgtgtagcgatccagactgaatcggagcaaatcacgtaccatgattgggatcggcttgtctctcaaaccgcaaattggctgcggtcacagccgagcatgccgaatcgtgtggcgatcctgctcccaaatagtctcgcgtttttacagctgtttgccggagccgcagcggctggatgtacggccattcccatcgacacacgctggagcccggctgaatgtaaggagcggctgtccataagcaatgcggatcttgtggttactttagcctttttcaaaaacaaactgacagatagccagacacctgttgtattgctggataactgtatggcagatatttctgaggcagccgctgatcccttgcctaccattgatccggagcaccctttttatatgggatttacgtcgggctcgacaggaaaaccgaaggcctttacgcgatctcaccgctcatggatggagagctttacctgtacagaaacagatttttcgatttcatcagatgataaggttctgattcccggagcgttaatgtcctctcacttcctatatggggctgtcagcactttgtttctcggaggaaccgtttgtttgctgaaaaagttttctcctgccaaagcgaaggaatggctgtgccgtgaatccatcagtgttctctataccgtaccgacgatgacagacgccctcgcaaggattgagggttttcccgacagtcccgtcaaaatcatttcatccggcgcagactggccggcagaatccaagaagaagcttgccgctgcatggcctcatctcaagctgtacgatttttacggcacatcagagcttagttttgtgacgttttcttcaccggaagacagcaaacggaagccgcattcagcgggccgcccttttcataatgtccggatcgaaatccgcaacgctggaggagaacgctgccagccaggagaaatcggaaaaatatttgtcaaaagcccgatgaggttttccggctatgtgaacggcagcacaccagatgaatggatgacagtagatgatatgggctacgttgatgaagagggctttctatacatatcaggaagagaaaacgggatgatcgtgtacggaggattaaatattttcccagaagaaattgaacgtgtgcttctcgcctgcccagaggttgaaagcgcggctgtcgttggcattcccgacgagtattggggagaaatcgctgtagctgtcattcttggaaacgctaatgccagaacactgaaagcctggtgtaaacagaaattagcctcctataaaattccgaaaaaatgggtgtttgcagacagcttgccggaaacgagcagcggaaaaattgcccgttccagagtgaaaaaatggctggaagagagtgtacagtataaatgaatgcggttattgttgatgcaaaacgaacgatctttggaaatcaaaacggactgctgaagcccttcctgccggaggatttggcggctcccatcatccgctgtctcagccgaaagctagaggatcaagttgacgaggtcattctcggaaacgctactggcagaggcggcaacctggccagactgtcagcccttcaagccggactgcctttatcggttcccggaatgacaattgacagacagtgcggctccggccttgaagctgtgcgctatgcctgcagccttattcaagcgggagccggcacgatgtatatcgcgggcggctcagaaagcagcagccaatcccctttttcagaacgggctcgcttttctccagatgcgatcggcgatccagacatgggcattgcggcagaatatacggctgcacgctattccatcagcagaagcatgcaggatgagtacgcgcttctcagccatcaacgcagcaggaacgcgcatgatgaaggattttaccgtgaagaagttgttgctctcggggaattggagacggacgaagcatttttgaaaacgcggccaatagaagcgattattccccgtgcaaagccggttttcgacaccagctccggaacagtcacagcagccaacagcagtggcatagcagacggagcagccgctcttttggtaatggaagaagaaaaagcagcagccctgggacttaagcctgtgcttcggtttatcggcagcgctgtcagcggcattcaccccaactttccgcccgcggcaccggttgtcgcgattcgtcagctcttacatacacacgatgtaacacctgatgatatcgatttatttgaaatcaatgaagcctttgccgtcaaaatttgtgtctgctcgcaagaactcggcattcccttttcaaaaatcaatgtgcgcggcggcgccttagctcttggccatccgtacggtgcatcaggtgcagctctggtaaccagattgttttatgaagcgaaaagacggccagactgtcaatatgctgttgcagccatcggaagcggcggcggaatcggactggctttattatttgaagttcttgcataggctttttcataggacacacgctttcgatttagtataatagcgatatgaataaagtcaggaaggggattttatgacagccgtttgtttagtaagacatggagaaaccgattggaacctgcagcaaaaatgccaaggcaaaaccgatatcccgctaaacgcaacaggtgaacgccaagcaagagaaaccggagaatatgtaaaggacttttcttgggatattattgtgacgagcccgctgaaaagagcgaaaagaaccgcggaaattattaatgaatatctgcatcttccgatagtcgagatggatgattttaaggaacgcgattacggcgacgcggagggcatgccgctggaggaacggacaaagcgctatccagataacatctatccgaatatggaaaccttagaagaactcactgacaggctgatgggcggtttggcaaaagtgaatcaggcgtatccaaacaagaaggtgctgatcgtggcgcacggtgcggcaattcacgccctgctgacagaaatatccggcggtgacccggagcttcaaagcacccgtctcgtcaacgcctgcctcagcaacattgaatttgcagaagaaaaatggcggataaaagactataatatcaacagccacttatccggctttatcaaataagaaaaagacaggcgtttgcctgtcttttcttttatttcttagcagccggcatctctttttgaagctcgtccaaaatggcattcgccccgtctacactgcggcgcagagaccacaccgcacgatccacgtggtatacatgcccgtttttcactgccttcagttttttccaaaggacattcttttcgatcgggcgtttaccgtcggcgtcgaggtcatctgtttttcctgtcatcaggatgatcacatccggatctgttttcagcagctgctccagtgtcattttcatattcacagagtcgccgccattgcttgaatcgctattgcctgacgtactgattgcatatcggtagccgacctgtgttaaaagtctcgatgtaaagaagttttcatccctggccataatggtatcatttgtatttccgatcaaaagcacggactggctgttcgcgctgattttctgctttgtctcgctaagcttttcttcatgcgccgtcagctttttctccatttccttctccttgccgactgcttttgcaatcgtaagcgaagcgtcaattgtatcctgataatcagcatttaaattattaagtgcaatcgtcggcgctatttttttcagctgatcgtacaccttcttatgccgggtcgtgtcagcaataattaaatcgggttttaatgaagcgattttttccatgcttggctgtgagcgagtgccgacagatgtgtagccgtcaattttcttcagcacatccttgttgatcagctgcttcgctttgttgtcatcggcaaccccgacaggcgtaatgccgagatcaagcagtgtatcaataaaacctagctcaagaacaacaacccgcttcggatgctcaggcacatttgtcttccctaaatcatgtgttaccgccactttatgttctttactgttttgattgccgcttgaagacgagcaagcagccgttaagacagaaagaagtaaaactgtaagaataatcagtgtttttttcatatgttccagtctctcctgttggtagtttctatggttaagatgtccaagagtagtataacacggaatgagaatcattatcaccaattatttttaaaatgagaagagaaagttcggcttacaggaaaatcttgtttcgcgacacagcagttcagcagctgatcatcctgtccacaaaaaagcttgcagaaaaataacattctctgcaagctgatcctgttaaagcttcacaatcactcttccttgaatgcgattttgcaaaatatcttttaacgcacccggcgtttcttccaatgatacttccctgtccacgatggtcagcagctgatcaggcttgagatcagaagacatgcgctcccaaacagcggctctgacgtccatcggacaatatactgaatcgattccgagcaggcttactccgcgaagaataaaaggatacacggttgccggaacttctcctccgccggttaagccgctcactgcgacagatccgccgtattgaattttgcttaaaagcgaggcaagctgttttccgccgactggatcaaccgctccctgccattgctgcttggacagcgccttaagcgttccgtcatagacatcttccctgctgattacttcgcttgcaccaagctgtttcaaataatcagccgcctcccggtttccggtacttgccaccacatcataaccccgcttgttcagcatcgataccgcaattccgccgacaccgccggttgctcctgtgactagcacgctgcctttttccggagacagaccgttctgttcaagccgatgcactgataacgccgcagtaaatcccgccgttccgtacaccatcgcttcttttaacgaaagattctgtggcaaaggcaccagccagtcaccaggcaccgaagcgtattcacttaatccgccatcacgtgagacaccgagctcatagcttgtcgcgatcacctcatccccctccgcaaaacgcggatcattggaagagacgaccgtacccgcagcatcaatgcctaaaataagcggatactctctgacgatattgcctcctgcttttccggccagaccatctttgtaattaatgccggaataagcaactttaatcaggacaccatccttcggcaaatcctctgttgatatggttttcacatggactgaaacatcatcggcatttttttctgcctgcaaggcttgaaataacgttgacattcggcacactccttttcatttatatcgtaaccgaagaacgttcaaaaaaccaaatcatcaagccgccattttcacttcgccggcacattgagacaataatggacaaatccggtatcctcttcatagccgttttgctcatacaagcttcttgccttccggttgtggtgctcagtctgaagtgttaaacattttgccccgttttgccctgcataatcctttgcggcagaaagcagccggccgccggctccctttgtacgcgcatgaggaacgacaaataagtcatttaatatgtatatccttttcattgacacagaagaaaacgttggatagagctgggtaaagcctatgaattctccattttcttctgctatcaaaataacagactcgtgattttccaaacgagctttcaaaaaagcctctgccccttgcaaatcggatgcctgtctataaaattcccgatattggttaaacagcggcgcaatggcggccgcatctgatgtctttgcttggcgaatgttcatcttatttcttcctccctctcaataattttttcattctatcccttttctgtaaagtttatttttcagaatacttttatcatcatgctttgaaaaaatatcacgataatatccattgttctcacggaagcacacgcaggtcatttgaacgaattttttcgacaggaatttgccgggactcaggagcatttaacctaaaaaagcatgacatttcagcataatgaacatttactcatgtctattttcgttcttttctgtatgaaaatagttatttcgagtctctacggaaatagcgagagatgatatacctaaatagagataaaatcatctcaaaaaaatgggtctactaaaatattattccatctattacaataaattcacagaatagtcttttaagtaagtctactctgaatttttttaaaaggagagggtaaagagtgagaagcaaaaaattgtggatcagcttgttgtttgcgttaacgttaatctttacgatggcgttcagcaacatgtctgcgcaggctgccggaaaaagcagtacagaaaagaaatacattgtcggatttaaacagacaatgagtgccatgagttccgccaagaaaaaggatgttatttctgaaaaaggcggaaaggttcaaaagcaatttaagtatgttaacgcggccgcagcaacattggatgaaaaagctgtaaaagaattgaaaaaagatccgagcgttgcatatgtggaagaagatcatattgcacatgaatatgcgcaatctgttccttatggcatttctcaaattaaagcgccggctcttcactctcaaggctacacaggctctaacgtaaaagtagctgttatcgacagcggaattgactcttctcatcctgacttaaacgtcagaggcggagcaagcttcgtaccttctgaaacaaacccataccaggacggcagttctcacggtacgcatgtagccggtacgattgccgctcttaataactcaatcggtgttctgggcgtagcgccaagcgcatcattatatgcagtaaaagtgcttgattcaacaggaagcggccaatatagctggattattaacggcattgagtgggccatttccaacaatatggatgttatcaacatgagccttggcggacctactggttctacagcgctgaaaacagtcgttgacaaagccgtttccagcggtatcgtcgttgctgccgcagccggaaacgaaggttcatccggaagcacaagcacagtcggctaccctgcaaaatatccttctactattgcagtaggtgcggtaaacagcagcaaccaaagagcttcattctccagcgcaggttctgagcttgatgtgatggctcctggcgtgtccatccaaagcacacttcctggaggcacttacggcgcttataacggaacgtccatggcgactcctcacgttgccggagcagcagcgttaattctttctaagcacccgacttggacaaacgcgcaagtccgtgatcgtttagaaagcactgcaacatatcttggaaactctttctactatggaaaagggttaatcaacgtacaagcagctgcacaataatagtaaaaagaagcaggttcctccatacctgcttctttttatttgtcagcatcctgatgttccggcgcattctcttctttctccgcatgttgaatccgttccatgatcgacggatggctgcctctgaaaatcttcacaagcaccggaggatcaacctggctcagccccgtcacggccaaatcctgaaacgttttaacagcggcttctctgttctctgtcaactcgatcccatactggtcagccttattctcctgataacgcgagacagcattagaaaaaggcgtaaccgcaaagctcaaaacagaaaacaaaagcaataacagcggaagtgccgcaagatcatgccgcccttctaaatgaaacatgctgcgggttaggcgaaccgtccgcttgtaaagcttatcaatgacataaaatccggcgagcgacacgagcaaatagccagccagaccgatgtaaacgtgcttcatgacataatggcccatttcgtggcccataataaacagaatttctgaatcgtcaagtttgttcagcgtcgtatcccacaatacaatccgtttattggccccaattcctgtaacataggcattcagcgcatttgttttttctgacatgttcacttcatatacatggtcagccggaatattggcttcatctgccagctctaaaattttgctttcaagctctttgtttttcagcggataaaaatcattgtataaaggatcgataatgaccggctgaataaaaaacagaaacagcgaaaacggcactgttaacagccaggcgtataaccaccattttttttcatgccttttgatcagccaataaaaaacgagaacgcaaagcgtaaagattggaaagctgatccaaaagctgataacctgatccttagcccagctggccgttgtctgtgtggaaatgttatagtcaagcgatacttgatagcctatccaatctaaaggcagcgtcaccaatgttgtaatcagcgaaagcacaaacacaaaaccaacggtctgcaaaaaccgaaaaggcacggccgcttcgatccatttcttgattttctttgaaacaccgctgacaagcagaacaaaaaacagaaaccaatcaagtggtaccccgataaaaaataaaaaattcttgacattcgaatactgctcggccactgccaactcagacggcttcatgaaagaagccggatcagcctgcgtccctttcacggcttccggtattgcggaatcacccgacaggaaaaaataccaataaaaaaacagcccgtacagcacgtaagcaagtcctgctgccgcaatccacttgcgcataacgcctcactcctcacatcaacccgttacttctattgtaatcataaattcaaattcttagaaccaagctgtgttccgcacttttccacccttttaagcatggaaaccccgatcgctgggaaaactaacaatgtttggagtgatgcaaatgaaaaaaatagtggcagccatcgtggtaatcggtcttgtgtttatcgcatttttttatctttacagccgatcaggcgatgtgtatcaatcggtagacgcggatttgatcacactgtcttcaagcggccaggaagatatcgagattgaaaaaagacagcacgtcaaagatatgctggatattatgaatcagggaaaacaggtgaagacagaaaaaacatcagcccctgattacgaagggacaatcaagtttcataaagaccggtatgactcattcagactatggattgacggcagccagcaagccgtttttttgaaggatggcacatactacaaattaagcaaaaatgatacaaaggcgctgctaaatattattaaaaaagaagcaaaggattgaaaatgaaaaagcgaagctaaccgcttcgctttttcattttattggggcaaaatatctctcagtgcccgtctgagcattttccccgtcgcatttttcggaatatcgtcaagaaacgtaatggcggcaggccgcttgtattttgccagatgcttttcgcagtgctgcatgatgtcctcctctgttaccccagagcgtttcggcaccacatatccctttaccgcttccccgctttgggggtccggcacgccgatgacaaccgcctccttgacgtccggatggctgtacagcacctcctccacctcccgcggatacacattgtatcctcctacaatgatcatgtcttttttccggtcaacaatgtaaaaatagccgtcctcatcccgtcttgccaagtcccccgtataaagccacccgtcttttaatgcatgctctgtttccatcggcattttataatagcccttcatcacattggggcctttcacgatcaattcgccgacctggtgagcgggcagctcgcgtccgagcggatctacgaccttgttttcgacatgtaagatacttgtcccgatggagcccggctttctgcccctgtcaaacgggttaaagcacgtgacgggtgatgcttccgagagcccgtagccttccaaaatggtaacaccgaatttttcttcaaacgccgtcagcaacgcgactggcatggacgcgcctcccgaaatgcacagccggatcgaagaaaaatcatctttctttccgttttcatgctgaaacaagtagttatacattgtaggcacaccggcaaaaatggtcgcctgctgctgcttaacaagcttaaaaacagatgccggactgaattgaggctcaatcaatacagttgcgccgctcatcagcggtgcattcatacagacggttaaacaaaacacgtgaaacatgggaagagcgcagaccacattgtccctctcatccattcccaaatagcctgcgacatcgttggcattgctgtacaaattctgatgtgtcagcatcgcgcctttcggttttccagtcgttcctgacgtatataaaataaccgcggtatcatcaggtacaggttcttggttttgtttagcggcagatgtcggccgcaatatttttgcaaacgttgtcattttcatcctgacctctgggtccgcagcttccggctcggcctcccccgtctggcataaaatgacgagctcaacctttggcagcgattcatgcatgctctcataaagcggcaaaagctggctaacgcccacgattgcctttacatcgccatttgtcagcatataaccaatttctgtcggcgtgtacaacggattgatgggaacaactacgatcccagcttttaaagcgccaaaaaacgcgatgataaaatcaggcgaattgccaagcagcaaagctaaatggtcccctttctccataccggcttcctgaaggccgtccgcaaatcgctgaatatattcattcagctcttgatacgtcatcatgtgatctttaaacctgcatgcgatgctgtcgggcttctcagatgctgtttcttccaattttgaaacaagattcattctcccaccccttaagtgaatgaatagtcattcattattgaagccaagctttcttctccattatagagaaacagaaaaaaacactcaagagcaaaaagccctgagtgtcagtactgtcatagtttcttcaatgcttcggcaatcggcgtatctccttctgtcagatcaaaggcccgattttccgtattcttctcatctaaagaggcaatgaccgtttttgcaacgtcatcacgggaaataaatccccgctccagatccttcgctgctgaaacagttcccgttccaggctcattgcgaaggcctcccggacggataatcgtataggttaaaccgctcgcttccagaattttatcagcataatgcttggccacataataaggcttgagtgcctcattccaattttcacggttatgggcttgcagggcgctgaccataataaaccgtttgattccggcaatggccgcagcttcaatggcttttgccgctccatcaagatccaccagcagcgttttatcatagcctgtgctgccgccggaaccggctgtgaaaatgatcgcgtcacaaccttttgccgcagcggcgatttcttccgggctgccctccagattcgcaagcacagcttctgcaccggcagcttcaagagacgctttctgttcttcttttctgaccatcgctctgatggaatgatcaggattatcttggaataaagagacgagtctttgcccgatttgtccgttcgctccgattaaaaacactttcatgtgaatccctcctgcctccattatttcaaaaacacaaccgctctttcaaacgatgtgttttgccttagtaaatcagatcaaggaaatcctctttcgtaatgttcccaaagtaatgcttgagattcacaccttcgagcacatcagcgatgacgctgcgttcgtattgttttccgaccagcaggttttcaatttcagatacatcaccgacaccgaagaaatctccgaagattttgcagtcctcgattttgcctttcttgacttccaggtgcaaatcgatcgatccaaccggataacgcttcgaatgattaaggttaaattttggtgagcggccgtagttccaatcccaattctgatagcgctctttcgaaatttgatgaatggtctcccaatctttttccgtcagcttatactccggcacgtttccaacgtcgtttgtgttaaaaatatggcgaagcaaatggctgcggaattcttcggtggtcattttatcatcgagaaactcactgatgtttgccactcggcttctgatcgatttgatgccttttgattcaattttatcctttttcacctttaatgctgatacaacatgatcaatggctgaatcaaacatgagggtgccgtggctgaaaatacggcctttcgttgcaaactgagcgtttccggatattttccggccatctactacaatgtcgttccggccgcttaattcggcttcaaccccaagctgatgtaacgcctgaatcactggctcagtgaattttttaaagttatgaaagctgtccccgtcatccttggtaataaagctgaagttcaagttccccagatcatggtacacagcgcccccgcctgataaacggcggacgacgataatcccgttttcctcaacatattttgtattgatttcttctattgtattttggtttttcccaatgataatagacggttgattcacataaaagagcaaatattgctgttcagggtctaaatgctttacacagtactcctcgatagcaagattgatccgcggatcattgatattttgattgtctataaataacatggtgctcctcctttatccttcccacacaaaacctgatttcgcaatattcacttctccgttaaaaacggttttcgcttctttgcgaaggttgtcatgcacgccaaaatgcggcaaatgtgtcagcagcagttctcccgctccggcttcttttgcaatgcgcccagcttccaggctgttcatatggcctgcacttgttccgtcttgatcggcataaaaattgcattctgagatcaataaatcagcatctttcgaaaacggtataaatgaatcctgatagctggaatcagcagtataaacgacagtgtggctgccgtcagtaatccgcatggcatagcacgtcaccgggtgaatcgtttttaaaaaggtgatcgtaaacggaccggcagtcagcggctgatccggctgataggcgatcccttttgtatgtgttttatatgtaagcttttgaaactgttctatatcagcatcatgtccgtaaatcggaagcgtatgctctcctttgccgagaaacgaaccgacttgcttggcaaattgcagcggtccgatatcagcgatatggtcatggtgataatgagacagaacgaccgcatccagcttttccgccggcacatatccgaacagcttagacaatacggcactgccgcaatcaacaagcagagagtaatcacctgactgaaacaaatagcctgacgtcgcttcatttgcggccggaaaaccgccatagcatccgataactgtaactttcataatgtcctcctatcttttcaaaaaaattggtcctccttcaatatacccatttttcttgaaaaaagcatgttttaaacattgtatcaaaacagttattgatttttgtaatctgttatattacaatgaaatcactacaaaggggaaagagggattggttatgctggggaaaatcacagaattttttagaaacctgccttcgaaaaagtgtgcggaatgcggaaaaaagatagaagagcagcatgagtgttatggtaatatctgcaatgactgtataaaagtaaacgatttgtaatgagcgaaaatcccgcgccttacgcgtgggattttcttattttttcacatatctcttaattttgaaataatagtcaggttaggtcaaagctcacctgtttttagataattctggtgattatcataatgtcattgaatattctttattttcgaaatataatttactatagacgaattgatttcttatctattataatttgatctaatagtgagattaaatatatgtctattcatgatatatgttgatactttgttttttgggaggtaatctatgaaaagaattaagtttggattagccacacaaatattcgttggacttattctaggtgtcattgttggcgtcatttggtatggcaacccagcattgcctacttacctgcagccaatcggggatctctttttacgcttaatcaaaatgatagtgattcctattgttgtctccagcttaatcatcggtgtagccggtgcaggaaatggaaagcaagtcggtaaattaggcttcagaacgattctgtacttcgagatcatcacgacttttgccattattctcggactagcccttgcaaacatcttccatccgggtacaggagttaatatacacgaagctcaaaaatcggacatcagtcaatatgttgaaactgaaaaagaacaaagtaataaatcagtggcggaaacgttcctccatattgtgccgacaaacttcttccagtcattggtcgaaggggatcttctagccatcatctgctttacagtactatttgcattgggtatttccgcgatcggtgaaagaggcaagcctgtattagccttttttgaaggtgtatcccatgccatgttccacgttgtaaaccttgtgatgaaagtggcgccattcggcgttttcgctcttatcggagtgactgtgtctaaattcggactcggttctcttatctctctcggaaagctcgtcggattggtttatgtcgcgcttgctttcttcttaattgttattttcgggattgtcgcaaaaattgccggcatcagcatcttcaagttccttgcttacatgaaggacgaaatcttactggcgttcagtacgtccagctctgaaacggttcttccgcgtatcatggaaaaaatggagaaaatcggatgtccaaaaggcattgtttcatttgtcattccgatcggttacacgtttaacttagacggttccgttctctatcaatctattgccgcactctttttagcacaggtatatggcattgatttgacgatttggcaccaaattacgcttgtgctcgtcttaatggtgacatccaaagggatggctgccgtacctggtacttcttttgttgtcttgcttgcaacgcttggcaccatcggcgttccggctgaaggacttgcctttattgccggcgtagaccgcatcatggatatggcacgtacagttgtcaacctgactggtaacgcgcttgctgccgttgtgatgtctaaatgggaaggcatgtttaatcctgcgaaagcagaaactgttatgtcccaatcgaaaacagaacaaaacgcaaccatttctggttaatgaaaagcctgcggggttcttgccccgcaggcttttttaatctttaacaagcacaaacaactctgtaatcaaaacagtatcctcattcagctccagttcaccgcttttgatcagttccgcccatgccatccgatgatcctcttgaaactcctcaattcggtctccattgccctctcctttgactaacctcatatcaggcgcaccaaaggtggtttcaaagacatctgttacttttatattgcatcttggattgtcatgtttatcataaacggtaacaagctgacccgctgtttgataaacgtccctcaattcatcttttgaatacaatgatttcggcgcgcacgtggcgcttttttctccggcaaggatctgctgaatcagctgttctcccaacccgtcatcaccttcccaaccgaatgtgcttttcagcttataaatcttcattggtcctcccccttataccattggtgactgtacatagtaatacagaagcttagcggtatggcgaagagatgatttatgggtgcgttcaaatgcatgggaagcgtcaattcccggccctatgaggccatgcacaatatcatgcccggatttgatcgctgctgacgcatcagacccgtagtacggatatatatcaagcttatagtcaatatgatgcttctcggctaattgaactaaatgctttctgagctgataatgatacggcccgctcgcatccttcacacagattgatactgaatattcatccgtcgcctgcccgtcaccgatagcgcccatatcaaccgccaaatattcaactgtttcaggaggaatattcgaattcccgccgtaaccgatttcttcattattggaaataagaaaatgggttgtatacggcagctcaatgtcttctgtttgaatttcatgaattaagcggagcaataaggcgacgcttgctttgtcatccaaatggcgcgatttaataaatccgcttgatgtgatctcgacacgtggatcaaacgacacaaagtctccgacgccaatgccaagctcctccgtatctttccggcagtgaacaggttcatctaggcggatctccatattctcttgattccgctcagcctttcccgcgtctttgtatacgtgcacagacgtttgatgcattaagattgtgcctgtgtacatttttcccgaggcggtttcaatttggcaatactccccctcaatcgagttgtagcggaacccgccgattaagtcgattttcagccggccgtccgctttaatttccttcaccatagcgccgagggtgtcaacgtgcgctgtcagcatgcgatgccgggatgtgtcgcgtcctggaagcgttgcaattaagccgcccttgtggttccgaaccgtttctaccttccattcttttaaaaggctttcaatataattgatcacctcatatgtatttcctgtcgggcttgggatcgatacaagttctttaatgagctccatcgttttacgtacggacgtcatagggcattcctccttttattttctacttaaaatatactcttttcccgagggacccgtccaatcttttcctatcaatctctcatatgctgtagagagcatgggaagaggagggatttctatgtgctgtcgtcattcacatgaacagaaatgtcgttgtcacgattggttcgatgatttttggttctttgacgagtggttcgataaagatttccacgaccattgcaagaaaaagaaagaatgccatgacccttgcgagaagaagaaaaagaaacaccattgtttctcttgtaaaaaacacagacattcttgctgtcattgctaaagactgaatcagaaatattctgatgacccatgcttaatgaatatttccattcacatttttccaagcgggcattgctgctgcttggaccttttattgaaacaccctttttgcttttacaatccaataaactgataaagccgctataagagcaacaatgatttcaacagctgcagcatgctctatgattcctctttgatataaaaccgccgggacattaaacagtgcatgtaaaagaatagaatacagcaaaaacagcggccggcggtttttaaccgcgtacaaaacaagcagagacagaccaatctggacggcaatggcactgattctttctattccgcccagcatccattcatacgaaggagtatgcagcagctgctcctgtatcggcaaaagcgcctgtttgacgtcgccattgaccaaaagctgttcaaacgtcccgctattgattgcaaatgcgtatacaataagtgagatagaggacaagcctgtaatcaggatggcttcaagcccgccatggcctgccccgaaagccagaccatctgcccaagtatgatggcgcttcataaaaaatcgcatcatcaaataccttccgcactcctcaaaaatgccggccatcaagcagccgtaaatgccataccataatggatgctgcatcgcttctttcgtcatttcattcacttgcagtacataaacatgaacgccgccttccagcagctgagcgaagacaaaaaacgtgagagcgccaataaaaaacactttaagcgaggcaccatactttcgcttaaaccatacaatcagcccgattggcaacagaaacgcaatagccccggataatgccaaaaagactactgcttcttgactgaccatttttcagcctcctttttctttttcatagattcctatctacacttctctttttttgtaaaaaaaccttctttttagtaccagatactaatatctagtgttataatctgaccataaggagtgattcatatgtcaaaagcaaaaattacagctatcggcacctatgcgccgagcagacgtttaaccaatgcagatttagaaaagatcgttgatacctctgatgaatggatcgttcagcgcacaggaatgagagaacgccggattgcggatgaacatcaatttacctctgatttatgcatagaagcggtgaagaatctcaagagccgttataaaggaacgcttgatgatgtcgatatgatcctcgttgccacaaccacatccgattacgcctttccgagtacggcatgccgcgtacaggaatatttcggctgggaaagcaccggcgcgctggatattaatgcgacatgcgccgggctgacatacggcctccatttggcaaatggattgatcacatctggccttcatcaaaaaattctcgtcatcgccggagagacgttatcaaaggtaaccgattataccgatcgaacgacatgcgtactgttcggcgatgccgcgggtgcgctgttagtagaacgagatgaagagacgccgggatttcttgcgtctgtacaaggaacaagcgggaacggcggcgatattttgtatcgtgccggactgcgaaatgaaataaacggtgtgcagcttgtcggttccggaaaaatggtgcaaaacggacgcgaggtatataaatgggccgcaagaaccgtccctggcgaatttgaacggcttttacataaagcaggactcagctccgatgatctcgattggtttgttcctcacagcgccaacttgcgcatgatcgagtcaatttgtgaaaaaacaccgttcccgattgaaaaaacgctcactagtgttgagcactacggaaacacgtcttcggtttcaattgttttggcgctcgatctcgcagtgaaagccgggaagctgaaaaaagatcaaatcgttttgcttttcgggtttggcggcggattaacctatacaggattgcttattaaatgggggatgtaacaaaaaaagaacttgtttccaaggaaacaagttctttttctttatgaagccggctgttcttctgatgtttcttccttccggcttaacattgtaaagtaagtaatgcttagtgcaatcatgacgagggcaatgccgattaagacgccggccatctgccacatgtagccaaagtcaccgtttgaaatgactgctctgaatccgttaatgctgtaggtcatcggcaatgcgccgtggatgacctgatagaaattcggaagcaattccagcgggaaggttcctccgctcgctcccagctgcagcactaaaataatgactgcgataaatcgccccgggttgcccatcgttgtagccaaaaattgaattatcgccaggaaagcgagactcgtaatgatcgtaaacacgtaaaatctccacgtgctctctacctcaagaccaattcccaatagaagaaccgtcgccacaatcaatgattgaatgattcctacaagcatcatgacattgaatttgctgaagaaccactcaaaaccgtttctcggacgtcctgacgcttccttcagcgggaagacaaccgtcagcatgatgccgccgacatacaagcccattgacaggatataaggtgtcagccctgttccatagttaggaacggaatgaatggcatcatctttggttttaaccggatccgcaaacatgccgtatgtttgatcatcagcatcgatatctcctgtttggtcagccgcatccttcagcttactagacagctctcctgtgccgtccaatagcttgcctaaacctgtatcaagtgatgcagatccgtctgcaagttttgatgatccgctttggacctgtttagacccgtctaacagcttaaacaatccgccggatacttggctgcttcctgtcaccaattgctctgagcccgcttttgcttttgcgaactgcttattatattcaccgatgcccgctgtcagtttagtttggccatctgtcagcttctgagaaccgttgtatatcttatcagctccctcagttaatctgtcaatcgcatcttggattgtttttgcgccgttataaagcttagatgtagcttccggcatggctttcacctgcgccacctgcgctttcacgtcttcaagagagctttttatcgttgcgatgtcaggcagctgatcagctgtaggtagctggcttaatatttgatcaaaatcaggcgcatcaacttgcggaagctttttctcaacagaattaatcagctggcttttttgctccgctgttaagaagtcactcgaattgatgacatttttaaatgcctgatcacggtttttcaaactgttttcaaagtcagtcagctgttttttgaattccttcatcgcagtttctgacttttccagattgtttacagcagtttcaagcttcgttaaatcgagcgcattaatgatcttttccgcttttgccgctttctcagaaccttcttggactttactgttgagctgatccaacccgttagtaagattaggcgtacccttctgcacattttgaagtccggcaagaagttcattcatcttgcttgtcagctcgcctgatcctgctgcaagctgactagatttatcataaatctggttgctgctgtcctggaatttaccgagcgagctgtcaagtgattggatgccgctcgtcacctgagccgctccatctgcaagctgcgctgttttgtcactgatggtagcggtgctttccttcagcttcgccagattttctttcagctgggcgcttccgtttttcgcatcctttgtgccgtcatcaatttttttcgcgccgctgctcgcgtcgctcaaaccttttgcgatatctttaaagttatcaaaaataactttcgtatattgctcggtcacttcttttgaaacagaggctttcagtttatcaatcgctttttcgccgatcgttgcccctacatagttagaacctgcatttgtatggtatttcagatccaattttttcggatttttgtctaatacagtgctggcattcttagaaaaatcctcaggaatctcgacaactaaataatatttttgattcaataagtcctttaacgattggtcgagatcattggaaaaatgccaatcaaagttgttattatcctttaattctttgaccagatcatcaccgatttgaagtttttctccttcatacgttgctcccttgtcttggttgacgacaacgacaggcagctggtcaactgtgccgtacgggtcccaataagcctttaagaatacgccgctgtaaataagcgggacaaacaaaatggcgatgatgggaatcaataattttttacttgttacgatgtctttccactgacttcgtattgtgttcatcctgatgcctccattctaaaactgactcatcataaaaaatggtcattttcttgcaaagagaaaggattatctagttcgctgacaatcctttgacaacatacaattcaagcagtcccgcaattgtctctttatcaagcggggggtgttgtttttcccagtcaaaaatgagcgcgatataaagcttcagcatcacaaaggctgtcagctcagggtcgcacggcttgattgcgccgcttttgatcccgtcttcaatcttgcttttgatataagacaggatggatcgctccattttctggatcacttcctgaactgccattgtaccaatctcggcattctcttggaaaattttaatcgtcagctgatgtgttttcctgaactccagaatggcaaacagcgctctgtgcacattttcatggaacggaaggctcggctccatcgcttcatccgctttttgcttcatttcctttaataaagtagtgaaaatctcgtcaaacagctcttctttgtttttgaaaaaagtataaatggttcccttccccacgttcgcaagttttgcgacaagatccattgtcgtcgctttatacccgaactgcgtgaaagactttgtagccgcctccaaaatgagcttttttcgatctattgacattgtattcacctcgaaactgaccgtttgaacattttagtcattaagtacatatgcaaatgtatcataacctgctgttcaattcaatcattttttacacaatattgccattgcacatcaaaaaaacctccgcgataaagcggaggttttagctgaataaataggtaagcgcgtcagacacggcagcttttccttgatcaatgcagtcgggaatgccgacaccttcgaaagaagcgcctgtcatataaacacccggatacgcagatgcaagtgcttcacgcagctccttgatacgctgcttatggccgacatggtactgcggcatgctttcatgccatcgggttacacatgtcatttccggctcgccgtttatgttcatgactttctttaagtcttctaacacaatgttgataatgtcattatctgatagatcgacaatggattcgtctccggcttttccgacatatgcccgaagcagcgttttgccttccggcgctgcgtgcggccattttttattcgtccacgtacaggctgtgatcgcaaagtcactgtttcttgaaatgacaaaacccgtgccctcatgctccatttggacggagccttcagggaaacctaaagcgacgtttgccacggatgtggagtgcatatttttcaaatgagaaatggcaggaagctcagaaagcattcccgcagccgctttatgcggagcagtcacaattactgaatcagcatcaagtgtgacgccgttatccagttcgagcgaatagcaagagccgctatggctaagtttggtcacttttgtgcctttatacaccttcgtcagctttaactgcttttcgatctcttctacaagggtctgcaaaccggttgacagagtttggaactgcccttgtttttttgccgtcagctgctggcctgagccttgaggccttgtttttttcatgccgagaatcaggcttctatgcttttgttccgtctgataaaattgcggaaatgtcgacatcaggctgagcttgtcaatgtcgcctgcgtagatccctgatagtagcggctcgattaagttctcgaccacttcatctccgacacgtctgcggaagaattctcccaatgactgatcatcctttgttttgcttgcaggcaggatgaaatccatagcagctctcgccttcccggacaaggaaaacagacccgtagaaacaaacggcgcaatttttgtcggtatccccattacagcgcccttcggcattggatgcagggtgcggtttacaagcacataggattgcccggtcgcattgttgacaagcaaatgctcaagacctaagtctttaacaagctgcggggcgcttttctttcgttccagaaatgagtctggccctctttcgatgatatagccgtctttcttgacagtctggattttcccgccgactctcggacttgcctcaacaagtgtcagctcaagcggcagattcttttctttgatttctttttccatatagaaggcggcggctaaaccggtaatgccgccgccgatgatgactacatgttttttgccgtcactcatgttcatcgccttctttaacgtcctaatttttttaatacgactgttgccaaagcatcaataaattcaggcttggcatttggcatttccggccggtaatagcttgcgccgatatcgtcagtaaccactttgcattcataatcattatcataaagcacttctaagtgatccgcgacaaacccaacaggaacatatacaaatgcttgatagcctttttgttcgaataaatcacgtgttaaatcctgaacatcgggtccgagccaaggatcaggcgtgttcccttcactttgccagccgacagcatattcggaaacgcctgcgccttcagcaattaatttcgccgattcatgaagctggtccgggtacgggtctccaaattctttgattttttccggcaggctgtgtgcggatacgatgagcattgcgttttctctttcatcctcaggcattgacgcatatgtttccttcactcggtcaacccaatatgtcacgaacttcggttcatcgtaccagctttcaactgacgtaatcgttaagccgccgagtttttcagcctcttctttggcgcgtttgttgtaggactgaacgctgaacgtggagaaatgcggcgccagcacgatgctgactgcttctgtaatgccatccttatgcatctctgctacggcgtcttcaataaacggctcgatatgcttcagtccgatatacgctttaaacgtaatctcatcctgaatttcattcaagtgctgttccagattatgcgcctgctgttctgtgatttgggcaagcggtgaaatgccgccaatcgcttcgtatctgtctttcaaatcttgaagcatttcaggttcaggctttctgcctcttctgatatgtgtataataacgttcaatatcttcttccttataaggcgtgccgtacgccatcacgagaagccccattttctttctactcactgtttacaccctctttaatgatctgatacaaacattttgacaggatatcattaagataccaaaagatatgcttaggaatattgacccatttttttgttttgtgaatattcatggacaaatgctgtcagttttttcaaaacctcgggactgacatcaggaaataccccatggccaagattgaaaatgaagccgtctgactccataccctgatcaagtatttccttcgttttctgctcaatgacttcccatggcgcaagcaaaatggacgggtccaggttgccctgcactgttttagtaattccttttgatctggcttcatcaatgccgagtctccagtcaagcccgacaacatcgagaggaaggtcatgccaatcacctgcaagatggcttgcgccaacgccaaacatgatcagcggcacattctcctttgcgagctctgaaaagatccggttcatcacgggtttgatgtatgttctgtaatctgcctgattcaatgcgccgacccacgaatcaaagatttgaatcgcttttgcgcctgcctcaatctgcgctttcacgtacacgatgatcatgtcggcaagcttggacatcagcagattccatgcatctggcatgctgtacatgaaggcttttgttttattgtagtttttcgacgggccgccttcgatcatatagcttgcaagcgtaaaaggcgcacctgagaaaccgatgagcgggacgttcagctgctcattgacaagcagtttaatcgtctcaagcacgtacggcacgtcctgttccggatcaatctggccgagtttttcaatgtccgccagagaccggattggctgatcaatcacaggaccgatcccgtttttgatttcaacatccacaccgattgacggcagcggcgtcatgatatctttataaaggattgcagcatcgactccgtattgctcaaccggcagtcttgtgacatacgcacaaagttcgggctgatgtgtgatctcaaacaatccgtacttttccttcagcttgcggtattccggctgtgagcgccctgcttgcctcatataccacacaggcgtgtgatccgctttttctccccgcgcagcttttaaaaacgtctcgttaaacgtttctcgtttactcatctgatttccacctttcatacggcaaccatacgttcgtatttcttgacttattacactataccttgttttaggcaaatggtatagaaatgtagctcaaagttcaaaaaatcgccgaattccattaagaggaaaacaattttggctgaacgtaatcggttccttccccttctctttttgtctgtgtattataaggcacaattttataagacgcgcccgaaaataagttggcataaggaatttcatagcttcccttcccttcaaccgaatcaagaagcgtctcctcgccgtccttgtttacataaattctgtatacggcccgatcatcctcttgagcgtcccactttaattcaatagtaaagagccccgctgctttaaatgtgtaatcggctgtgagtgttttgaccggcttcagctcaatcgggctttccagttctttaacgtttttaggctttgtgaacacatgaccggtttctcctgcctgtgtcaaaatatccttaaacagccgcgtcgggtatgagctcccggctttcaaataatggttttgatccgttttgtcatagcccatccagactgccccggttattttcggcgtatagcctgcaaaccaggcgtcctttgtcgcgccggagacgcctgtataagatgttgaacctgtttttcccgccaggtcgccgtgataggtgccggacgtggccgttccctttttgactacctgctgcagcattctcgtcatattccaagacgtctgcttgctgaatacccgctttccttcttctttatgatcggctattgtttctccgtcttcatctattatgctcgagataaagaagggttcagtatacgttccattcgcggcaaatgtatgaaacgcgccggcaagctggagcggtgaaacgcctttttccaagccgcctagagcaagagcaaggccttcatcagggatatcaatgccgtttgctttcaaataagatttccctgtttcgacgccgatctcattcagcgtccagacagccggcgcgtttttgctgtacgtaatggcgtcagacatagtgacttcgccctcataccggctgtcgtagtttttcggcgtataatctccgtaggactgcaactcatccttcaatagagaatatggcttaaatttcttttcctgcatcgccggtccgtatacagcaagcggcttaaatgtggaacccggctggcggacagctgtgacacggttatatcctttggatgtgtaatcccttccgccgatggccgcttctacaccgcctgtcttgttattaataaagaccgcgcttccctcggcattctgatctgttccgggataatagcttccctctttcatcacctggtaagccgtcttctgcagcttcgaatcgagcggcaccttgatcgtgtatccgccttgaagaagctgctctccggaaatggaatacttgtcttccgcctctttgatcacaaggtcaatgtagctgtcaaaccaaggtgtttccgactgtttcttcacatgcagtccaagcgtccggccctgtgcggtgacagcctctttcgcactgatatagccttggtcattcatcatacctagaattgtatcacgccgctccttatttttatcagggtgcaaaattggagagtacgtagaaggcgccttcggaatagcggccaaaacagcgccttcagatacagtcaaatcttttacttctttattaaaataatagtgggacgccgcttgtatgccgtaaaccccgtgtccgaagtaaagctggtttaaatacatttcaagcagcttgtccttgctgtaatcccgttcaagattaatcgcaatgatcacttcttttgtttttcttagaaatgttttgtcatgtgtcagaaaaatatttttggcaagctgctgggtgatcgtgcttccgccttccacctttccgcctgctaatatatcgcggtacactgcccttccgacggattttgcatcaatgccgtgatgctcatagaaccttttatcctcaacagcgataaacgcttctctgacctgcttaggaatctcattgatcgagaccggctcgcgattttctgtatacaggcttgcaacctcatctccgttttgatcaacaatttttgaagaagcatgaagaataagctttttttcatctatgacataatggccgagaaaaataattgaaatatatcctattaaagcgagaaaagcagttaacactaaaataatgataggtataaaaagtttctttttctttatcttaaacatgaactcacctcgcctttctaaaggtagtatgggaaaaattgtttggaattatgttcgaagcactcgccaatagaaacttataccattgttttgatatactagcaagcaggaggtggctgatatgaaggtttatattacatatgggacagccgattttttaaaaacgatcgtacagaagcatccctcagaaaatatccttttgatgcaggggcaggaaaacgccattttaattcatgaaacaaacggagataccgttttccaggcaccacacgcttatgaagtcattgaccaagtcggagagatcaaacatcccggttttgcagtattgaacaatattgccgttactcaggaagggcgtccgctgtttgaaaacagatttaaaaacagagcgggaaaagtcgaaaacgagcctggctttgaagcaattcgagtgctccgtccgcttgacagtgacacctatgtcattctgaccttgtgggaaacggaaagcgcctttcaagactggcagcagtccggttcttacaaagaagcccacaaaaaacgcgatacatctgccggaattgacacaacgtcgatcttctcccggccttcctatgtcaccacatatttcgctgtcgaatagctgccggcatgtccggcagcttattttattgggaggaaagcaaaatgaagcatacttgcccagtctgcgggtttaagggattggctgaaccgccatatgatcatgaaggcaatcattctcatgaaatctgcccgtgctgcggttttcagttcggatttgatgagtacgagatgcagcacgaggataactcatatagagccatcggaaagcatcatcgcctatagaaaaaactggcttgctgaagggtgcgtcattttttctcctgaatgcttcccaaaacatctgcaaaaagcgaatagaggattaaggcatcatctgattgagcagctgaaacagatcaatgttcatcttccatcataaccctcccctctgtcccggcaccttccgcccgcctatgaataatctgtaagcggaaggagtgatcgatgatggaagtcgggattttgcctgtccatgttctgtatgtgttttttatcggtgcaattatcctatttatgctgctgagaaaagacacgacatttatttctctattcggcatttttatcatatcgctatgggccagccattcactttcagcttctgtcagcagtttattccacagctttatctatgcggccggcgaactgctgcccacgattttcatcatttgctttatcgtttcaatgagtgatttgttaacaaaaacagggataaatgaagcgatgatttctccctttgcaagccttgtgagagggcctgtgactgcctattggctgattggaggcctgatgttcgccatttctctattcttctggccttctccgggtgtcgctttgatcggcgccgtcctgctccccgcagccgcacgtgccggtttgacgcctcttgccgcggccatggccatgaacttattcggacacggttttgccctgtcaggagactttgtcattcaggcggcgccaaagctgactgcggatgcagcaggcattccagtcggtgatgtcgtctcggccagtattccgcttgtgctgattatgggtgtgacaacaacaactgctgcctttatcatgattcagcgcgaacgcaaaaaacaggagcatcccacttctttttcccccgttctttccggcgaacaagacaactcgctgtacttgccaaaacgcctgcggtccatactggcttttttgattccgcttgcctttcttgcagatatcgcctgcatgctcttgtttaacctacaaggaaatgatgcaaccgcgttaattggcgggtctgcaatttgtatcctctttaccgttcattttttcgtgtataagcataaagggcttgaaaaaatcaccggctattttattgacggatttaagttcggttttaaggttttcggccccgtcatcccgattgccgctttcttttatcttggcgactcaggctatgaaagcatactgggcacttcactccctaaaggttcccacggcattgtcaacgatcttggcattgctttatcccatatgatgcctatgtcaaaggagcttgccgccactgcattaactgccgctggagccataacaggccttgacggctcaggattttctggcatttctctcgccggctccatcgcaaagctcttttcgtccgctctccatgccgatcccgctattctgaccgcgctcggacaaatctctgccatctgggtgggcggaggaacactggtcccatgggctttgattcccgccgcggccatttgcaaagttgatccttttgagcttgccagaaaaaacttcattcccgtcgcgattggccttttggtgacaaccctcgcagctgtgatgatgctttaaaacagcatgagttgaaatattcagactttttctatacaatcatggaaaagcatagaaaagggggaagcggctttgtccatatccacactgcagaaagagataaacaaacagctcgacggctgttttgaagaaatggttgagatcaggcgccattttcatatgtatcctgagctctcatttcaagaagaaaaaaccgccgcatttattgcttcctattatgaatcgttaggagtcccaatccgcacaaacgttggcggtagaggggttttagcaaatatagaaggaagcgaacccggccctacagtcgctttgagggccgactttgacgctctccccattcaagatgaaaaagatgtcccttacgcctccaaagtgcctggtgtcatgcatgcatgcggccacgacggccacaccgcagctcttctcgcagtggccaaggtccttcaccaaaacagacatgaactgaagggaacatttgtgatgatccaccagcatgcagaagaatattatcctggaggcgcaaagccaatgattgatgacggatgtctcgaaaacacggatgtgatattcggcactcatctttgggcaactgagccgctcggaactattctctgccgccccggcgccgtaatggcggcggcagaccgatttacgattaaagtcttcggaaagggcggccacggcgctcatccgcatgatactaaagacgccgtcctaatcggttcgcaaatcgtttcctctttgcagcacattgtcagccgcaaagtcaatccgattcaatccgccgtcatttcgacaggctccttcatcgccgacaatccgtttaatgtcatcgcagaccaagcagtactcatcggcacagcgcgttcttttgatgaaaatgtccgggacattctggagaaagaaattgaagcggttgtaaaaggaatatgcagcatgcacggcgcgtcctatgagtacacctatgaacagggttatccagcggttgtgaaccatcctgcagaaacgaaccacttggtgagcaccgcaaagaataccgagggcgttcagcaggtcattgacggtgaaccacaaatgggcggcgaggattttgcttattacttacaaaacgtgaagggcacttttttctttacaggcgccgctcccgaacagccagagcgagtctattcccaccaccatccgaaatttgatatcaacgaaaaagccatgctgacagcggccaaggtccttgccggcgctgcgatcacctatcatcagctataaaaaaacagccggagtgtttattctccggctgtttcctttaatatcctcagatgaaaaacatgtcttgccgtttctccaagctgagcaagcagcttataattggcaattccgccgactgccgctcctacgcccggcaaaagctgaaaaagcttcacgacgtcgatataatcgcgatattcctgctggaacactctccagtcgatgctctttttctccgtctcccaattttcgatgacagaaaaaagcgacttacggccatcatcactcgaaaacgcaagctgaaacacgagcagcaaaaatatcctttcttgtgcatccttgacatcaaagccgtaaatggaagacaaggtaaataaacacttcatcttaattgaaagcagcagcggaaaatcagcaatgcttaaaaaaatgccgcccgctccggtgccgactccctcagcagctgccactttttgataagaaacaatcgtttttttcgccaattcgtttttttcactgagcgacagtgcacttgtatcctttttataggtgatgatattagagccggccattgtcgcttctaccatttttttcacactctcggtgacgaccgtatggattttttcaggaatccgttcattcaccttcgtctggacacgcttcgaaaagcgttcaaacatggaatcctttcgcaaaaaatgcattttccattccaaagcttcctgcatcagcagctgattatctgtcatttgattacctcttttcagttcacagctttccgtgctttttcagcctggtcgtcatataagcaggcaaaacaacaaaaatcagaacggcagaaccgatcagcgcgtacagaaaaccggtcaagccggctgcataggcagatgcaacagacatcagcagcgcttgaatactaagtgcagtttttaatagagagaaatagcttttcagctttgtttctttttgcacagggtacagctcttgaagcgccagatggtcaaagtgaccgaagagcggcagaagctgaatgcccgtaatgaaaatggcaaacacagtcaaaaccgcggcaatcagcgggctggctgagacatacataatgatcagcgcgaaaacgatcgttaatctgacaagaatgcccaaataatcgctcgaacgcaaaaaggcgcgggtgaacatataggcaaatgttttgcgctgttcaaacggcacaagccgcagcaaaaagtcgagataagctctgcgtttggcttgctttcgcaaatgcggcacatcagtaaacaggttggcaatccgatagaaacgctgctttcgtctcaattcggactcaatatggctctcccatttaaatgttttccgttttgctgcggaagacatatacagataaagaacagccataatgacatagacgagaagcgcatacatataaacagattggaaaacaaaataaagaacgagtgtattcgccgcaaagcgaatgatgacgtccatccgtttcatgctgcggtcgttttggaaagtcgttcgccattccattacctgattccacgctttcagcagcaacagttggacaaagaccgcggcatacgatacgagcgaagctcccggagtgactgcgaaataaagcggcatcgcaacgatgctcagcgcaatcagcggaaacagctgagacacatagctgtagacaaacgcctgcttcaagtaaggctccatttttgcttcaagaggcaataagaaaacaaggtcagcctccttcaaaagcgttcgcacataagagcttgtcaatacgagcgaaaacagcacggccatcacccaaaaggacggaaagtgagcgggaatgtcccgtatccatttgctgtaccagcttgcagcgcccgctagaaaaaaaatcaaaacaatgacgaggtgatcgttgagcatatatttcatgtatgttcttgtttctttgatatgctcctgcagccgcgactgccaaatatcaagcatattattcatggccagcgtcttcctttgtaagctcaagatacaaatcgtccagcgccgcgtccttcattccaaactgctctctgagctctgacagcgtgccgcgcgcccgcacctcgccgttatgtaaaataataaacgaatcgcaatagcgttctgccgttgccaaaatgtgtgttgacatcagcacgctcgccccgccttttttcgcttcattcatccgttcaagcagcgcgttaatggcaagcggatcaagccctagaaaaggctcatcaataatgtagagcgcaggctctgccaaaaatgcgcacataatcataaccttctgcttcattcctttagaaaaatgggccgggaaccacttcagcctcttttccattcggaattcctttagtagcggaggcagccttttctccatcgtttcttttgacagtccatatgccatggctgttagttcaagatgctccatcagcgtcaattcttcgtataaaacaggtgtttcaggtatataggtaaattgtgaacggtagccttccggatcctcagcaaacgttttaccgtttaattcgattgaacctttatgcgggtccatcagcccgatgatgtgtctgattgttgtacttttaccagcaccattcagcccgattaagccgacaatttgattcggttcaagggtgaatgatacgttttttaaaaccggattccttgtatatccgccggtcaagtcttttaccgatagcagagacatagtttctccccttatagtgtttttcttcatagtaccaaaaacaaggcctgatttgaaacaattcccttttaacaaatgatgaatttgctgtcataaagagacagggttctggacatcataaaagttgtagaggaaaagcatatcaactgaaaaatgaggtgtttgtcaaagacgtcttagaaacagttggatagaaaataaacatgtccaatgctcaaaccatttctcttcactgaattgatgaattcttcatgtatgaagcaaattgtcaaatgaggtgtttatcgcaggaatcgttaggcattaaacaagtcttcattttattgacaaatgaggtgcttaccaaaggcataacacattttcttcatataagctcttcctctgcattcagggtgaacgctcgccgttcatcctgttttctattttctgcatttctgtggtacgatgaatgtatacatactaaacaatttcataaggaggaaccctcatgcattgtgcagagaattgtatcttttgtaaaattattgccggcgacattccatcagcgaaggtgtatgaagatgaacatgtacttgcctttcttgatatcagccaagtgacaaaaggccatacgcttgtcattccgaaaacacatattgagaatgtatatgaatttacagatgaattagcaaaacaatatttccatgctgttccaaaaatcgcccgcgctatccgggatgaatttgaaccgatcggcttaaatacgctgaacaataacggcgaaaaagctggacaatctgtgttccactaccatatgcatattatccctcgctacggaaaaggagatggattcggagcggtttggaaaacgcatgctgatgattataaaccggaggatctgcagaacatctcttcctctatcgcaaaacgcctggcctcatcataagatgaggttattttattttgtgaacatttcgcaaacatccgtcaatttcttttgataattctaattttttatcaaaaaactgaatttttgtgataggataattgtattattttatacattaacgtggaaaacagggagagatcataatggaacgtacaacgaattttaacgcaggtcctgcagcgctgccactggaagttctgcaaaaagcacagaaagaatttattgattttaacgaatccggcatgtctgttatggagctttcccaccgcagcaaagagtatgaagcggtgcaccaaaaagcgaaaagcctcttaatcgaactgatgggcattccggaagattacgatatcttgtttcttcaaggcggggcaagccttcaattctcaatgcttccgatgaactttttaacacctgaaaaaaccgcacattttgtgatgaccggcgcttggtctgaaaaagcactggcagaaacgaaactgttcgggaacacgtctatcaccgctacaagtgaaacagacaattacagttatattccagaggttgaccttacggatgtaaaagacggcgcatatttacatatcacatccaacaatacaattttcggcactcagtggcaggagtttccgaattctccaattccgctcgtagccgacatgtccagcgatattttaagcagaaaaatcgatgtgtccaaatttgatgtgatctacggaggcgcccaaaagaacctcggcccttccggcgtgactgtagtcatcatgaaaaaaagctggctgcaaaatgaaaatgcgaacgtcccaaaaatcttgaaatattccacgcatgtcaaagcggattcactctacaacactccgccgacatttgcgatttatatgctgagcctcgttctggaatggctcaaggaaaacggcggtgtggaagctgttgaacagcgcaatgaacaaaaagcgcaggttctctacagctgtattgatgaaagcaacggcttctataaaggacatgccagaaaagacagccgctcacgcatgaatgtcacattcacgcttcgggatgacgaattaacgaaaacattcgttcagaaagcaaaagatgcgaagatgatcggccttggcggacaccgttcggtgggaggctgccgcgcttctatttataacgcggtctctctcgaagactgtgaaaaattagctgcgttcatgaagaaattccagcaggaaaatgagtaaaaagtctggctatgcaaaccgtccgtttggtatactgtttgcataacacattctgtaaagccttcgcaataaatgatgagcatattattggagggcaaaaagcttagcagaggagagcatagttatgaaaacaaaagagttagtcattatggctctgtttgccgcaatcggcgcagcgcttcattccattattccgccctttttaggcggcatgaaaccagatatgatgctgatcatgatgttcatgggcattctgctgttcccgcgggtgcaaaatgtactcgtcatcgggatcgtgaccggaatcatttccgcgcttacaaccgcgtttccagccggacagatccctaacatcattgataaacccgtatcagcgtttctgttcttctccctgtttctcttgttcagaaagagccggaaaacaggtgcagccgctgtgctgacagtgatcgggaccatcttatcaggaattgtgtttctatcgtcagctttattgatcgtcggtttaccgggcggtttcgccgcattgttcgcggctgttgttctgccggccgctgtgctgaatacaatctcaatgatcattatttatccgattgtgcaaaccattttaaggcgttcaagctttatggaagctgctaaataattgtcacacaaaacctcttccgcttccgggagaggtttttttgaacagagcgcccgcagcatgtcagcatgttttaagcgaggagttttgtgaaaaagataagacatagtgtaaaggcggttccggttgaacaaacaagcgctttctgccggataaccctcttgggcggataagaagcagcctggctgagaagtttgatatagtaaacagcgcctgaagcgaaggcaagggtgatgcaggataatacaatcaaaaagacagacaaccttctccctccttttcacttaaaaaatatgctaaaataaagcaagctatgtatagaagttcaggctttcaacaaaaatgaaaaatgctgaatgaatcctattttgaagaaaaagacggggtgattgtaatggcgagcggacgttctctattaacaggactattcgtaggcggcatcatcggaggagcagcggttcttcttactgcaccttcctcaggaaagcagctgcgtgaaaaaatgaaaaccaattatgattcttttgaagaaacaatcaaacgcttaaagtcagacgggcttgcattaaaagaccagctgatcaaagcggcaaaagaaagcacggatgttattaaagacgtgggcggcgagctccaaacatcaattaaaaaatggcaggaagagatcaagcctcaccagcaggatctgcaaaaagaaattgccgatatcgaagagaaaatcagacagctggagaaaaccttacaaaactaatatcctattcaaaagaaaaaaatgcgggccaaaattggacccgtattttttttggccgaaaaaccctttcgtcgcaatggtttgtgaatttattaaaaaattcttacattttcatctttattaatctttattttattggcataatagagaaaaagaaaaagagaagcaggtgacgtaatgaatcgagtggaaccgccctatgatgtgaaagaagctctggttttcacccagaaaatggctcagcttagcaaggctctttggaaatcgatcgagaaggattggcagcaatggctcaaaccgtatgacctgaatattaatgagcatcatattttatggattgcgtatcaattgaatggagcttccatttctgaaatcgcgaaattcggggtcatgcacgtatcaaccgcattcaacttttcaaaaaagctggaagaacggggatatttaaggttctccaaacggctgaatgataaacggaacacatatgtccaattgactgaggaaggtaccgaggtattctggagcttgcttgaggaatttgatccgacacgcaacgctgtttttaaagggtcacagcctttatatcatttattcggaaaatttcctgaagtggcagaaatgatgtgtatgatacgccatatctacggcgatgattttatggaaattttcgaaacgtcactcaccaatattgacaatgactttgaaagcgtaaacggaaaattgaagaaaaaagcaaaggacagtgcggcggatgaaccggctgaagagctcgaacctgtaaacagttaatcaaaatgcttcatgatgtcgataaagacttccatcagctcttgataaagcccctgctcatacagggcaaaaattgtttcatgaacatctaatttttcattcagctgtccggcaaaaagcgcaaggagcttatcaaaggttacaaatccttgcgctttttgtgttgccagctcttccgacaattcgtcgcatatcctcataaccgcttccccttcttccttgctcagccctttatcaatgagaagcgcatagaaggggtacctgtccatatctactgttttcactaataattgtatgtaatattctaatcgctcaatgcgatgatccatcgaatccatccacaccacttctttctatctttaatcttattttagctgataattcactgagaagaaagttctaaccccatatttcgcagtttgtttgcttgtttcaaaaaaatacctgccggatgatattttttcttaaaaaagcattgattttttctcttgggaggagtaaattattttgagattctattcaagatgtatggaaggatgactttgatgaattgctggaagaccataaatctcatgaaggattatggcgccgttcgcataatattaactgctgtatgttttatgattttggtttttatatctacctttttagcttttgagctgctgcggcctggcacaagcttaagcgatgaatatgtatctttattcggcggtttgctcgtcgttattttatttgtacataaagtcatccatgtcctgccaatcatctgcaaaaaaagaaaaatagaaaaaaagttttacatattgcgcatgcgcacatggaaacgtataccaaaaacaacaatgctgatttcactcgtcagcccgttcttgctgattacaccggtattgttttacgcagcactggcatttccgaatcacgctcattatttttgcatgatctcgggcattcacgccggctactgtctgcctgatttcctgctggctctcaagctgataaaagcaccgaaaaccgcttttattgatcaggaagctgacggcttggatattcttgttgaaaagtagtcaaaccctggtgctggtggcgatttttcaatttgcattctatcttttttaataaatatttggtaatgtaatatgggacagttcagagagagggggaatctcccatcattttattctattttatcgtggctgccgtgtttattttatatttcataaacaggctcaccaatacattatgccttgtcagagagattcctgaagagcggcaagataaggtattccgatttattaatgtatctatattaattttactgatctcttcgtttgtggagatctcctttacagtgtaaatacgaaagaaagcatagctgctgattaagcagctatgcttttttatgttgattagtacagccaagaagcgccgatgataatcaataaaataaataacacaaccaataaagcgaatccgcctgcaaatacttcacccatcttaaatagcacctcctgtaataagctttatttaccaattacatgttatgcaattcatgtttgaaacgattaggcgctagtgaaaataaaggatcgcttatgttgcaagcgatcctcgggctgcttagtagatgtaagctgcacctacgatgataagcaaaatgaacagtactacgagcaacgcgaatccgttagagtatcctccgctcatgttacatacctccttttcttgatcaatatataagtatgtcatcagcaaaagtttgactagacgaatgccctttatttaaaatctttttacagaaagccacaatatgttatgatacgcataggtaatttaatttggaatgattaggagtgtttgaaaacaatgaagaaaatcgcaatagcagctatcactgctacaagcatcctcgctctcagtgcttgcagcagcggcgacaaagaagttatcgcaaaaacagacgcaggcgatgtcacaaaaggcgagctttacacaaacatgaagaaaacagctggcgcaagcgtactgacacagctagtgcaagaaaaagtattggacaagaagtataaagtttcggataaagaaattgacaacaagctgaaagaatacaaaacgcagcttggcgatcaatatactgccctcgaaaagcaatatggcaaagattacctgaaagaacaagtaaaatatgaattgctgacacaaaaagcggctaaagataacatcaaagtaacagacgccgatatcaaagagtactgggaaggcttaaaaggcaaaatccgtgcaagccacatccttgttgctgataaaaagacagctgaagaagtagagaaaaagctgaaaaaaggcgagaagtttgaagaccttgcgaaagaatactcaacagacagctctgcttcaaaaggcggggatcttggctggttcgcaaaagaaggccaaatggacgaaacattcagcaaagctgcattcaaattaaaaacaggtgaagtcagtgatcctgtcaaaacgcaatacggctaccatatcattaaaaagacagaagaacgcggcaaatatgatgatatgaaaaaagaactgaaatctgaagtgcttgaacaaaaattaaatgacaacgcagctgttcaggaagctgttcaaaaagtcatgaagaaggctgacatcgaagtaaaagataaagatctgaaagacacatttaatacatcttcaacaagcaacagcacttcttcatcttcaagcaattctaaataataaaaaaagctgtgcggctcattgagccgcacagctttttttatgcgatggaatggttttgattttcttcttcatgctgctgagaactgcggcgttctcgctccttttccatcctctccatataaatctgtccttctttttcaataaaagcctggtctactttttcttcctctttggctgccgccacaagtttatatgcgctgaaaatgatgcctacaatacaaagatacacccaccacggaaaaaataacacgggctcctccccctttgcatagattctttattcttaaccatatgcgggaatgagacgagttatgtgcgggaaagacgcatcaaaaaggactgagctgaatatgtcagcatcagtcctttttaagttatttatgaaatgtcggtttataaaaggaacggttttccagtgcaaatacacgttcagtatactcgcccggcttcacgcgctcaagcgctctgtccatcatattcatttttgcatccagattgtctatatagtgaagaatttccgcttctttcaccataggcggtttcgggctgccccattctgctttgccgtggtgactcaaaatcaaatgctgaagaattaacacctcttcagaatcgatttgaagctcctcagccgcttttgaaagctctgtcaccatgatggaaatatggccgagcaaattgccttcaaccgtatatgaagtggaaacagggccggacagctccttcacttttccaagatcatgcaggataacaccggcgtaaagcagatcacgatcaagagaaggatataaatctgctattgctttcgccaggttcagcatagagacaacatgatacgccaaacctgagacaaactcatggtggtttttcgtagccgccggataatccataaactcagcttcgtgttttttaaccaaaaaccttgtgattcgctggatattcggatttttcatttcaaatatatattgagtgatggtatccatcatttcatttttcggaatcggcgcggtttctaaaaaatcatcaatattgacgttttcttgctcgcttaccggtctgatatttcttagcttcagctgggtgcgtccgcgataatggtgaacatcgccgacgaccttgacaatcgtctgcggcgcataggtcacttcatcactttgcttggcatcccacagcttcgcttcaatatcgcctgactggtcttgcagcatcagcgtcagaaacggttttccattgcttgcaatccctttcgtcgaggatttaatcaatagatactggtccacctgttcgccaacctcatgtagcataatccctttagccattctattaaagctccctccgtatcttacataataccagtatatcacataccgattttcagctatagaacctcttttatgacaccaaatggatgatttggctgctatgaaatgcatcttttacgtgctcatggcatgtaaaatacaaaatctgcctaccgccttcagataaatcatacagaacatgtaatacacgtttcagcctttcctgatcaaaatgaacaaaactgtcgtcaagctggaacggaagctttgactcaccctggcgcgtaacggccaaagcaaagcggatcgctgtatacagctgttcacacgtcccttgtgacagctcttccgcatgatagacagtgccatcgcgatgcataaccatgatcgaatcatccgtttcggaaaaataaatggtttggtagtttccgtcagtcagaggacggaaaaattctcctgccgtctccagaaggcgcggaagctcgatttttttatgccgctccaatttgtttctgatcacctgtttgaccatttgtatggaggcccattttttagccgtttctttcacacgttctttttgcatttcggtttgaagcttgaggtctgagaccattcccgaagcctctaattgttcctgtttgactgagagcagtgcgatttggctgcggagctgctcgatctcctcagtcagccgctcttttctttcattctcaacaaattgcttatctttcaattcagaaagcgtattggaatccgccagttcaagttcctccgggtacccgccttgaagctgtgcgtttacgtgatgaagcttgttctccgtatccttcaattgcctgctgatggcggctatggcaaaaaacgcatctctgtcttttgcagcagccgcggcaaataactgttcaatctgtgcgtggaaatactgtatttcttgctcaagttcaagcatctgttcctttgtataatgaatatctgtttcaatttcctttttttgcttctcaatttctttttcacgttcaatgtttttccgcaatgtgtgaagggcgtccgaaatggagatatcctgactctgattcacgggaagaagcatactgacgcgttcttcgaatgttctccggtgctttttcagcctgcctgcttctatggtcagctcatgctttttcttcacttcttttttaacatccttcattaagctgtatgcatcaagcaaaaatgatggatcttccttaaatccgagctcattcataaaacgctcaacctgtgtaaaggacggcgccatttcggcttcccactgttcaaactgctggatgaccctttcatacgccgcctctttttgctggagcgctgcacgctgtgtgagaaggtgctgcttattgcggtcatcctcccataacgcttctctaagcatttcagcttctgctggtgaaatatccgtcatgggctgtcttgtctctcggctgtttcgagaagacgactttcctgaaacaagccaatacacaataagtgcagcgccgaaacttatggcgggaatccattgctgcagcagagaaaagagaacgatgaacaacataccagctgcaatgacagtctttttctgtttagcctgctgtctttcaaaaaacgttagctgttctctgagcttcgcttgctcttggtgctgcccctgtgtttcatcatatgctctaagagctgcttctttatcttttctttggctgttttcaagaatcgcggacgaagcggcacgaacggccttttccgcgtcttccagctcttgccgggcaagttcaaacgtctcgtcaagctgccgttttctgtctcttgcctgtacatattgctgcaccgcttgctgaagctgccattcataatcatatgaggtgttcatattcaggagctcattttcatccgttttattgagctgttccagccctgccgctgtctgcgcagacgtctggcgcagctgtgcctgaatggctgccagctgttctccccaggattggtacatatgaaacgctgccgaaagctcttgtatcagcgtttctttcgccaatagttctttatcggggataagcttttgcctctgtttgtccaactccgccatcttcacccgaagcgcctcaagctgtgctgatttcgggtgaagatgggattcatatttttccagctgatgcagtccgtcagcaggaaattgtcctgcgtgttccggaaattctgcaatcacctgttcgagtgtcgctttttcatttagcagcggctttcgctcaatcgctccctcaatcattcggatatgtcccgccgtctctttcaattcggtttccgcggctgcaaggcgggcttcaagcgttcgtttttcctcgagaagctgatgatagcccgcttcctctgcttcagcctgttttagcttaactgccagctgcttaagcgtttccagctcctgattcaattgagggtttcgcccatttggtttatagagcctttcgctttccttcgtcagccttgaatcaagctttgatacggcttcagcaccaaacaagctggaaaagagcaaaaattcccctatcttgtcccgattaaaggcgtgaatttcctgcagcccgaatacgtcgaacgaatatatggctttgtacaacgacctgtctgtgccctggaacagctgctttaaaacatctccctgctttacttcgcccttttctgtgtacacgcttagtttttcggcagtccctttcgtccgttcgatcttcagcaccccatactcaggatgttcagcttcaagaacaccgccgtagacaccgcctgttttcggttcatactttttcgttttcggaaaaccgaacagcatgctttcaatgaatgacatcatcgtcgtttttcctgcctcatttaatccgtagatgacttggacaggagaggcggaaaagtcaaaggtccgattggaaaattttccgtattggtagatatgtaaagatataattcgcaaagctgtcaccgcctcatgtatcaagcaccttaagctgtcttttcaatattatctgtgcctgctcttttatttcctttacctcctcttggctaaaccggtccgcgtgccttctatacactggatgccgctcaagcccttccagcacgtctgacagatcgctgcgatcaatgtcttcaaataaaccgccaaaaaaaggatcaaggtttgttaggtttgcttcgttttctgtctcatcgtccaatctaagaggccaaacgaaacgttcctcttccgcttcttgttcctgaagagcttcaagaaactcatccaaggtgccttttggcgcctccagcagccattccggcgccgtcccttgtaaaacaagccttacacaaacagggctcccctttttccgcagcttcgaaaacgtgtcctccaccatttggaagagggctgtcatattctttgcctccgtcacatcaaccgccgctttttcccacaggacatcatgcgctctctgaaattcataagatatatctccgtttgtcacatgaacgagataatagcctttatctcccgtctcctttatatggcgtgcttgcgtgtttcccgggtaaatgactgccggatgctcggcagatagaacctggcgtttatgtatatggccaagcgcccaataatccatcccgcttttcacgaggtcgtcatgtgtaaacgggcaatacggatcgtgtccttcagatcctgacagcgtgccgtggagcatgccgatatgaaacggtgcgtcagttgatctccgatagcgggcggcttggttttccatcaatgctctggcttgatagctgaagccgtaaatgcttgctatgcgcctgccttctttaaaaaacgatttttcttctggaacagcggacgaaaaaatatggacattctcaggccattcaatcggcgtccactccccgccaagatgatcgtgattcccaaagatgacgtataccgaaattccgcactctctgagtctttcaaactgttttttcaaaaagagctgagcctttaagcttcgattggcttcatcaaacagatctcccgcaagcaaaatgaaatcaacgtgctctctcactgcggcgtctatcatatgtctcacgcttgcaaacgtgctttctttaatccgggcaaaaatcggctccggcagatgcgatatcccgtaaaacgggctgtcaagatgaagatctgccgcatgaataaaggttagatcagtcaacattctgctcctttccaggatgaagtacccttattttagcaccgaattcttgcgaatgcacgttctgtcaataaagaaacagcctgagaatccccaggctgttttccaatcagtttttcgctaaacgtagcgcttgtttgatcgctttgaacgcgcttgaattgccgtaaattaatacaccgcctttataaattctggcgccgataacggccagtatgacaatggtgagcagtgtgattccgattccgacagccgcctgccagaacggaatatcaagcatgccgacgcgcaggaacataatcattggcgtaaagaacggaataaacgaagttaccgtaataaatcctgcgtcaggcgcattcaaaccgaacatcgcgatcataaaaccggcgacaaccaaaagcgtcatcggcgtgatcgtttgctgcacgtcctctattctgctgacgacactgccgagaaacgcggcaagtgtcgcgtacaaaaagtatccgagcaaaaagaaaatgacagcatagatgacagtggttgcagatacgtcggtcaaattaaggaatccgccgacagatgaagccgtttcgctcttttggttcagcttaagcgacagagagccggctcctataataatagcaagctgtgtgatcccgacaagcccgataccaagcagctttgcaaacatttgctggatcggcggcatacttgagatcaggatttccataactcgcgaagatttttcggttgcgacctccatcgctatcatgctggcatacataatcaccgagaaataaatgacgaacagcataatgtaaacaagccctaccgtctggccaagctcttcctcagactttgccccttctttcagcgccttctgccccacagtaacaggcgcataaaggctgctaatcgtttcctgcgacacgccgagctccgctgttccgacagctgttttggtttgcgtcagcgcctgctgcagtgtttgatacgtgctttcatcagaaatcgttaacgctttatatgttcctgaaatggtccctttttcatctcgtttgatgatgagcatgccatcgagtgattcatctttgacttgctttgtgacctcatcctccgattgcttcgacagcttcacatcaagatcgccgtctgtatccaccgctttcagctgcttagaaaaaaccggatataattcgtttgtttcatcaacaacggcgattttttctttcgcatcgtcaccttgaaacaaagaaatgatcgactccagattcgttacaactaaaacaagcagcaccgtgatgacagtcgaaataataaaggattttgccataatcttatttttgtatgtatgagaaagcatgatccaaaatttattcatagacggcccccaccttttctataaaaatatcatgcagtgacggctcttcaagctcaaactttctgataaacccttttccttggagcatcgcaaaaatctcttgagaaatgtcttcattggcaatctgcagcttgacgccgtctgccgtttccttccattgaagaatgccttcatgggactgcaaaaagcgcagatcgtcatcggagtgaatggtaacattctttttaccgaaagaacgcttgatctccttcagcttgccttgtacaaccggttttcctttctgcaatatgcaaaggttctcacaaagctcctccacatgttccatccgatggcttgaaaataaaatagaaacaccgctgtttttcagcgagatcacggcctcttttagcagctcaacattgacagggtccaagccgctgaatggttcatcaagaatcaggagctccggcttatgcaaaactgccgaaatgaattggattttctgctgattccccttcgaaagctcttccaccttcttattctcgtaatctgtaatattgaagcgttcaagccatgtcccgagctcttttacagcctctcgcttctccatcccttttaatctggcaagatagacgagctgatcccttaccttcattttcggataaaggccccgctcttccggcaaataaccgattttgttgctgatatgataattcacaggacggcccttccagctgattgagccctccgtaatgcttaataatcctaggatcatgcgaaacgttgttgtttttcccgctccgtttgcgcctaatagaccgaacatttgctgttccggaatatctaagtccaatccgtcaacggctttataatctccaaatgtcttcgttacgtgatcaattgtaagcactgaatctcctccttccctgacccattatatactaattttggataaagcataataaaggattttgatttcctttttagaatataaatgaagaaagactgataaaccttaaaatggaggagaaacctgatggctgattatttccttaccgtatttgatccttcggggaacacgctggtaaacgagcaattcgaggcagaacatgaagaagcggcaaaaacgcatggtgaagccctcttaaaagaaaaagagcttcatagtcatactcatcgtttagtcaatgcagccggaaagctgattttgtttcacagatgatcagctttccggctgatctgttacgcttgaaacttcggctcccgtttttctaaaaaggcacggattccttcttggtgatccttggtccttctcattctctcttgggcgctgcgctcaagggatagcacttttttcagttcttcaatttggaggctttgaaaaatacctttcgtttcgatcatcgccaaaagaggggaggccaacagggtttcgataatgggtcttgcgccttcggcagggtctccggcaaatgtcccatcaagaagccccatatcggcagcttccgaggcagatagtttttttccgctccaaatcagttttttcgcttttgcttcaccgattcttttcttcagcaaataatgtcctccgccgtccggaacaagcccaatgccgataaaattcatcgcgagaacggcgtttttttcagcgagcacaatgtccgcacaaagcgccaaactcaggcccagtcccgcagcagcaccatgaatggctgcaattgtcactttcttcatctgatataaattcagggtgacagcctcaatcgtatccatcagccgtttaaattggtcagggtcatgctctgacgtcatcatcctgatatcaccgccggccgaaaagcctttcccgcttcctctcaggagaacgatgagcgcctcgcttgcagccgccatttcgactgcctccttcaattcagacagcatctgttcattcagggcgtgatgggcatcaggccgattcaggataatctctgcaacggccccattacatgcatattgaacaaactccattaaaagcacctccatgtatgcgcttacttttttctttctcctatacattccccgccatccccaaataaacctttttatttttcaaggtcaatagatactgaaaaatgcatattgtttgaatggaaacataaagttttatatagtgaaaaagaagggatatcttgatgagaagggaggaaaggaacatggataaattgctgatcagttttctgttaagtttatttatggtgtactttcccccttcggacgtggttctgccttcccagtttgaagcaagcactgacagctatgtgcctatgtcttcatatccgcaggaaacacaatcggcaaaaacgccatcgccgggcagcatgcacccggctgagctgatcaaagagtacagcccgctggcgcagtctgtcaggcagctctctgtcaaaccacttgacgaaccgctgataaacaggctggaaaaggctttggccgtccctgtcaaataccagtctaattacctccgaatataatttgctcaagttttatttgtaactcaccccatactgccaacactacattcggagggattttcattgaatattaaagaaaacgatctgccgggcatcggcaaaaagtttgaaatcgaaacaagaagccacgaaaaaatgacgattatcattcatgatgacggaagaagggaaatttaccggtttaatgaccgggacccggatgagcttctttcaaatatttcattggatgattctgaagcaaggcaaattgcagctattctcgggggcatggtctataaaccgcaagctctggagtccatcgaaatggccttcagcgatcttattattgaatggtttaaggtcgaaaaaggcgccaaatcgatcggacgcacactcggtgagcttgatgttcgccagaattacgatgtcactgttattgcgattatcaaacacaaccaggaaaagctcctaaatcccggagcggattcgattattgaagaaaatgacacccttgtcctctcaggtgagagaaagcatctgaagaaactgattcacgattttctttctggagagggcgtgtgagccccgatggaccatcttgtatttgaagtcggaactgcacttgtgcttgtggcaatcgccagtgtgatcgccaataaaattaaattttcgattattccgtttctgattgtgctgggaatgcttgttggaccgcacgcgccgaaaatggggattattgatctaacatttattcaaagcagtgaaatcatcgagtttttcgggcgaatgggcgtactgttcctcctcttctatctcggactcgaattctctgtcgggaagttaatcaaatcaggaaaatcaatcgcggtcggcgggacgatttatattttgattaacttcagcctcggactgctttacgggtttatcaccggattttcctttctggaagtcctcatcctcgcaggcgtcatcacaatctcgtcaagtgcgattgtcgcaaaagtgctcgttgatttaaaaagaaccgccaacccggaaaccgaattgattctcggcatcatcatgtttgaagatattttccttgccgtatatctgtccgttgtttccggccttatactaggtgatgcgacatccgtagggagtgcactcttgtccattttgatcgccttcggttatatgctgctgttttttatcgcagcaagaaaactcccgccgctgttgaacaaactgttggacattcgctcaaacgaagtgtttattatcgtcattttcgcagcactcttttttatcgccggtttttcagagacgattcatgtagcagaagcaatcggcgcgctgctgctcggtttggtcttttcagaaacagagcattccgataggattgaacacctcgttgttccgtttcgcgacttcttcggtgcgatgttctttttcagcttcggcctcagcatcgatccgttttcgcttggtgaagcggtttggcttgcgttgggtgcagtgattttgaccattctgggaaattttatcgccggaatggtggcaggacgacgcgcagggctttctcataaggcttcatcgaatatcgggctgacgatcgtatcgcggggagaattttcgattatcgttgcgaatctcgggatagccggcggactgtcggccacattaaagccgtttgccgcattatatgtcctcattctggcgattttgggaccgcttgtcacaaaggaatcaaaacgaatttaccgcttgctgaacaaggtatttaaatggaagcctgaggttcagcccgcaaaaaaacagggataaaaaaagcagcactgtaatcagtgctgctttgtcgttttttcaaaaatctgctctaaatatttgattttttcgtccgtgtagtgctcgaagcgctcattgtacgatttcggatctttcggattcgcaaaatgcgtaattttccctgtatcccgatcaataaatttactagcagcgccgcagccgatgccaataatcgtctgcacctcttccataatcataatgttgtagatgctttcttgtcccggcaaagagtatccgacgttttcaaggtttccaagaatgtttttctggcggtataaataataaggcacgtacccatgctctttcgtccaggctaccgcgtcttccatcatttgagaaacctcttccctgccggcaactttgtacttatgcttgtttctcgtcatttctgacgcccgtttaaatgaaagagtatgaacggtaagggattccggcatcagtttttctgtttctgaaagactgtgcctgaactccttcacgccttccccaggcaaaccaataatcaagtccatgttaatattattcatgccgtgctggcgtgacagatgatatttctcaatggtctcttcaaccgtatggtgccgcccgatcgcctttagcgtttcgttttcgtaggattgcggattgatgctgatccgatcaatgtcatatttgtttaaaacggcgagtttttcttctgtaatcgtgtcaggacgaccggcctccaccgtaatctcacgaatgtttttcacatccgggaaggagcggaccatttcttcatacagcagatccatctcctccgctgtaatgcttgtcggcgtcccgccgccaaagtaaatggttgtaaccttaacatcatgctccttcagccattcaccgattttctgcatttcgtaatgcagtccccataggaatgagccgactctgcccgcctgtccttggatagcgtacgcagggaatgtgcaatacgcgcattttgtcgggcagaacggaatgccgatataaatgctgacttcatcctttactcggtacaaatccggcactgccgccagctgacggtcaacaatttcctgcattagcatgattttttcatcatgaattaaatagtcttttttcaactcagcatgcgcttgctccttggacattccgctttgcagttttttatgaagcagctttgtgggccggattcctgtgaggattccccacttctgcgtaatgcccgtatgcgcctgaagaagattgagatacacataagaaattgtgtttttcacttgcttaaaagcttctttttcagtcatgtctggagaaaagaattttgtatgctgttcctttatgccagtacccttcacttctccagaaaccgtcacatgctcatccgtttgtgacaacgctaaagaaatgacaaaatctgcgggctcctctccgccatacgcaagctcgcactcttcataaaacaaatttgcaatattttgcagaggccgatgcaggcggtcatcatgtatgccttctattttaatttgcaacttcatcacctaatttatcagattcaaaactttctttagtgtacagaaataaactgctaaaatcaatccggcaaaaaagccgccgcacctgtcagggcgcgagcggcttttttacacacgtttcatgtggaacttatcaagaaatccttttcgctgctgcattcggaaatattccttcatcatataagcgacaccttgctcgtcattggaccttgtaacccaatctgcctttctcttaatttccggaacggcattccccatcgctaccccaagaccggcaagttcgatcatcggcagatcgtcatactgatgcccaatggccacgacatcatccatactcaggcccagctctgaagcgacgagggccaaacccgcttccttcgagacacccttcgggacgatattcagtttctcatcgtttacgcgaatcacgtccaccgcagggaaggcttttgtaatcgtttctgtaatgtcatgctgaatgtcgtgctccgtgtacacctcgatgacgggtgcactcaccggctcatccatgaggagatcgcttaatgattcaacgaactggactggataaaagatcgggtcagacggatgaatgagtgctttccctaataaattcgaattcacctttttcttgtttccgatggaatacttttcgtgaagaagccgaatattgcattgatagctctccagcacttgaacaatgttaaaggtatgatcatcagaaattcttttttcaaaaaacggggcgtcaattttctcagcgatatatgccccgctatgggtgatcagcttggcatcaagctttagcgatttcgctattttctgtgctgagcgaaaatgacggttggtcacaagtgtgacgtaaatcccttttttctttacatattcaatcgcgtctttcgttgcctgatgaatcttcccgttcgaccgaagcagcgctccatctatatttaaggcaagcaattgttttgacacagagatgtccccctccttgatgactgtacttgtgtataggatatgaccctgtctctgtgtttagaacaaccttttcttaaagcaaaaaaagcctggctcagcagactttatgtatggcttgttgataggatacgatcgaagcagccattctccctaatatcgttatttcgatttacgaaaaatcatgtatcaggaaccccttgtttgaccaatgatgcgctccgaacacttactctctgttgcttatcccctctatataacggcatgatatgcgaccgtatccatttgaaataggtaagtgtaggcgctttcaatgttattatctcagttttcctttccgatgacaagggtttttttaactaaaaaaagtaaccaacttttgtatatccgtggtaggatcagttgttaatttttaggactatacacttgatccagaacgtacattcccatacaatataaataataaacgaaaaagcggtgtttatatggctgatttaaaagaaatatataatgaagaactgatatctcagttgatccatcatgtaaggtcatcctatcctgattttaacaaaaacagattcttggatacattacggctggaggactggcctgaactcactttaaaagagcggatgcgccgcgtgacagtttctttatacgaaactttgccaaaacaatacgttgaagcgctcacaattttacgggatacagcccctcattttaaaggactcagcggaattttatttccagattatgtggaacagtacgggttagcgcattgggaagaatcaataaaggcattggaatcctttacgcaatattcgacctcagaatttgctgtaaggccttttttgctgttagatcaagaaaagatgattgcacaattgcttgcatggtctgagcataaaaatgaacacgtgagaagacttgcgagcgaaggcagcaggccccgcctgccatggggaaaatcgataccggctttgaaatcggacccttcccccgtattgccgatccttgagaagctgatgcaggacgagtctttatatgtaagaaaaagcgtggccaacaaccttaatgatatatcaaaaacgcatcctcatttactgagaaaagtcgcagatcaatggtacggaacacatccccatacagactggattatcaaacacgcctatcggaccttattaaaaaagggtgataaacaggccttagcgctttttggttatgaaaatgctgattcgatacaactacatgatttaacatgccagcccaaacgtatagttattggcgaaagccttgaattttctttctatattcattcagacagggatcaaaaagtaagaattgagtacgcaattgattttgtaaaagcaagaggccagcgtcatcagaaagtatttaaaataacagaaacaaatatacgaaaaaacgaaacgaagtcatacacaagaatccaatcctttaaggatttaaccaccagaaagcattacaaaggaattcatacattatcagtcatcatcaatggagaggtaaaagattcattggatttccaagtttgctgagtgaataaaaaatcccttcttatccaagaagggattttgcttattagccttcaacactgccgtaaagctcttctaaaggcttcataatgattttgttcaattcaccaatcagcatgctcatgcgctgctccgcttccatcagctgagaaattttttcgtgctgctgtacaagcgcaactgttttttgagcctgcgtcacttcttcttgtgtaatctcttctcctgccatttgtttttgctggagtctaagctgtacatcacggaagttttcgaacatgcgcttcgctgattcatctgcgttaacttcgtcgtaaaggttttttaaacgggtgaattcttcgctcccgcgtaatgcattttccagatcatacgctacatcataaaaattaacagccattgtaaatagctcctttcatcattgccgtttgacataccactccactataacagactatggagctcctttcattaatcaaaaaccatttcttcttaaaaaaggatgacaaacaatgcttgaatcgcgcctataattccgccgagaaggccccccaaataggtaatcattttaaattctttttttgaaatggacagcaccatttcttcaagacgctccaccgggaactgatccacctgctccttgacgatttcctcaagacgcaaccgttttaagacactttcaaggttggacgaaataccttcaagcaatttgtctaatagtgccggcagcatttgctgggtcagctcagattcatagcggacggtaagcgtgccaatcgtattgttgaagaaaggggcagtcgaaaatgcttgcagcactcttcgtttcaaactgaaaatgagcgcctttgcattccatttttcatctgcttcattaaacgtatactccctcagcttgccccattcgttttttaagagatcagaaagcaatttatttgtttcctcattgcgcaagaatttcagcagctccggcagcacgcgatccgcaaggcttgaattgccaagaaacaattgcaccatgcttccaagcatgccgcgctcttttaaaaagtcatcaatcatattgccaagacggatttttccttcatcactttcaaaataacggacactccgtgacaatatatatcctgaaatcatcggaattttttcctcaagcttttcctgcacctctataggcaccagctcttttaacgattggtccccgtattggcggaaaagctcatgcagcttatcatcggtccagctgctgatccatgcatcagcagctttttcggggcgcttcatcccggctttttcaagcgcttcttttactgtcacttcagaaagtgacagcttttgaatcagctgttcccccactcgaagagcctgcgttttggctgcatcagagacgagccgctttttaatgccttcaggggttaagagatgattgactaccatcagtcccatttgttttgcaagttcatctcgccgtcttggaatcagcccgggcgtaaaaggaactcgtttcccaaacaaatagtacgctttatacggcctaaacagcatttgaattgctaaatgattggtcaccgctccaatggcagcgccgatcacgatcataaaaataaaggttcctgcaatacccattcctattcatcttcctccatctgtgcttcagcttttttcatatagattatgtacctatacgtattatagaggctcatgcaatcacttagcaaacgaggagacaaattcctgttcttagaaaatcagcttgttcttttggaatagggcaaggtggagaatcgtattctgtaaagtagaataccgtcagctgcgttcgtcttacatgtatttagtgtaaagctgcggacacccgccggcagcttttgaataaaagggggagtctcaccatgataacactcggttttatgtccttatcccgccagcatgaagcggattattccgcagaactggccaaaagagcacccgaattcggcatacgtttcatccggtttacaccatttgatatttcacctgacactttgcgtgtcaaagcatcggtctatcattcggccagcagcacatggaacgaaactgaaatggcgattccagattatatttatgatcgctgtttttacggcaaggattcacattcccaaaaagcaaaaccaatcgttgagtggctcaaaaaatatccgaaaacggaatttatcgggcggggtcttcccgataagtggaccgtccttcacgatttgcagcagcactctgtaatcaatccctatattcccgaaacgataaaggtgagccgctacgaacaaattcactcctttttatccaaagaaaaagcctgcatccttaaaccggcattcggcgcgggaggcagaggcgtgattcttttgaagctgggcaagaaaaacatcactgctacttatcacatcggaaaggataagcagacaaaaacgttttccaaccagacttcttttaaaacatggtgcaaaaaagtgcttcagcatcaatatttgcttcagccttacttaaacattcaagataaggaacaatacccttgtgatattcgtctgtttatggaaaaaaacgaagcaggtgaatggaatacagtcggaaaggcagtaagacgcggatacaaacacgggctgctggccaatttgtcaggcggatctgatgcgctgacatttgactcctggtttgaagatataccgaaaaaacagcaagtggttttactagatgatgtgttttcaattacccaatcggttccgtattatcttgacgagcgctatgggccgttgtttgaactcggtcttgatatatgtcttgcaaaggacgggagaatttggattttagatatcaattccaaaccaggcaggaagtcaatcctgcgtgtctctcccgagcaaaaagaacagctgtacacttgtcccctaaaacgctgccaatatctgttttctgagcaaagccagaaaggagttcttccgcgtgaatcctaaacggtttttgatcggcatagacaaaaccagtgaaaacaccctgtttctgccctcttcgctgaagcaagacggacttttgcatgccgcattcggaacgaaggttgtcagatgccacgttgcttacagacggcatctggaacaaaccgtgcttctctctgaaaatctgtttcatgagcttttgcttccccaccgaagcagggcagatatactgattcatgatcatacagtgcatatcgggccgttagtcggcatctttacggcagggtttactgtatctcttgaacgcccatttaaggatcgttccctctttttttctaaacttgtcacgttacacgagcaagccgggggctactgcttcgtttttggcgcgcaccaaatcaattgggaggaaggcacgattgaaggcctcctttacagggaaaacggctgggagaaaaaaatcgttccattgccgaacgtcgtttatgaccgtttgccgaaccgaaaaattgaagattcacttctcttgcaacatacaaaaaagaggctgatcgatgaatatcagatcccatggtttaataaaacgtttttcaataaatggaacgttcatcaattgctcgaaaaagatccaagaacggcaccctttttgcctagatccgagctgacaccgtctgtggagctgatagatgagctctgtggcgcatacaaaaaagtctatatcaaaccggcaaatggagcactcggcaccggcatttatcagctgacaagaacagatggcggcctgacggtaaagcatacgaatgacgccaaaacttttacatcaattgattattccgatgccgcctcattccttgcagaatttcaaaaacatcacaacccgtccgactttctcattcagcaaggtgttgatctcatcgaatttcaaggcaaaccagcggatttccgtgtccataccaataaaaacagaaaaggaaaatggacagtgacagcaatcgccgtaaaaatttccggaaagaacagcattacaacacatctttctaacggcggcactgtaaagacacttgcggaagtatacgatgatcccgctgaaagagttgaggtcattaaaaagctttctgcagcggcactgactgcaagccatgtccttcatgatcatatcgagggatttatcggggagattggtttcgattttggcattgatcagaacggtaaagtatggatgtttgaagcgaattcgcgcccgggccgaagcattttttctcatccaaatttgcatcatgttgattctcttacaaaacgaagaagttttgaatacgcgtcatatttatctgagaaggcaatcacatctccggaagcattgtggccttcgtaacctgtccgcttttttaataaagcgggcttatctttatccaaagctgggacaaactgcatatttaggcctcttcaatgatgttctgaaacaatgatacaatgaacataagccgtttttatttaggtcaattgataccaaatgtaaggagcgtggccgtaatgatttctcatttcagctggaaacctttgttcccaaaagaaaagctgcccggatggaaaatttcattttattataaagggacccattatgaaggcatctatcataagagcggtgagattgaatggggagacttgtttcccgcccgcgctgacgagcctgctcttacaaacgagatacatgaactgatgctttttcatatttatgactagcttagcctaaacggctaagctttttttatttctcaagatttaccacacaattctccgcatgattttccggccattttaacataatacgtagtaacaagccggcaaagcattgggttacgccgaggcggcagtgacacccgagaagggttcacagattggtgcaactccagttaacccaaccatactaaataaaaaggagattttacacatggctaaccaaaactcttcaaatgacttactagttcctggcgcagctcaggctatcgatcaaatgaaacttgaaatcgcttctgaattcggcgttaaccttggagcggacacaacttctcgcgctaacggttctgtcggaggagaaatcacaaaacgtttagtatctttcgctcagcagcaaatgggcggcagagttcaataacaattcaatatatggctatagagggcgcggtttccgcgctctctttattttgtcacccttttttcctgctccacatatcctagaaaaaaagggagggaatcggggtgtcattcatcaccattgtgaattgggagctggttcaattcgtaagtgtatccatgattcatgaatatgtttcccatcgttctgtttatttgtacaggtattctttcccgcgctgttcaaactgagaacatccttttataatgaaaggcgaggaggttttttaatgaaaatcgctttattaggagccagcggccgcgtcggacaagcctttttaacacaagctgcagcagatgaaagatttgatattttcgctctgatcagatctcaacatgctgatcttcccctttcaaaagacagaactgtcatggggaacgcccgccgcttagaagatgtgaaaaaaataatggagaatgctgaaatcgtgatcagctgtctaggcacagatggtgatgataccttgtcaactgctatggcacacattctctccgttatggaggaacagcatatcaaacggcttattacgatcggcaccgcagggatcctagattcccgatatgaaccgggaaaataccggtttgaaacaaatgaatcgaaacgaaagcagacccgcgcagccaaggagcatgcaaaagtatacgaaatgcttaaagaatcatcattagactggacaatcatctgccccacttacctcccggacggaacagcaaccggcgtttatcgtacggagcgtaacgttttgcctgagggcggcacaagcatttcggtcggcgatactgcggactttttatatcgtgagctcgttacaggtgagtatgtcggaaaccgtgtcggactggcttattgactacataaaccaaaaacccaaaacacgattgttttgggtttttgagcgttatgcaatggaatgtttctgtcccttttgcagttcatacatttgataatattggccttctaatgccatcagttcctcgtggttccctctctcaacaatttctcctttatcaagaaccaaaatctgatcagcatttctgattgttgaaagccggtgagcgatgacgaaggtggtgcgtccttgtttgacgacatcaagcgccttctggatcacggcctctgtctctgtatcaatatgcgccgttgcctcatctaaaatcaagatcgcgggatcaaacgccaaagctctagcgaaagaaattaactgccgctctccagaggatagcgtgctgcctttttcaatcacgggctcattaatgcccttcggaagcttcttaagaagaggctcagcaccgacttgccgcagtgcattttttatttcttcttcagtcattctttcgtcatccagacttacgttagatccgattgtgcccgagaataagtacgggtcctgaagcacaatacccatatgggatctgagttcctgtcttgacatgttgtaaatgctttttccatcaattaagacatcacctttttgcgcatcataaaaacgaaacagaagattcaaaatcgagctttttcctgatccggtatggccgacgagcgctacggtttcgcctttttgcgcagtaaaggaaatatgctttaatacctcttcaccttcttgatacgcaaatgacacatcacgaaattcaacccgccccagcgcgcgctccttcgccggttcacccgcttcttccgtattcttttcttcaagcagttcaaaaacacgcccggcggagacccttgcaagctccagctttgaaaactgattgacgatgcctgtgatcggctgaaataaccggttcaaataatcgacaaacgcgtacagcacaccgatagaaacaatccccgccgcattcaggctcgcaccgccaaaatgccagatcagacagacgaacgcaagattgcggatgacattgaccagattatgggacattaaggagtttaaattcagcatcctgttttggaaataaaaatgtgattcatttaattcctcaaattctctcattgtttccttttgatggcggaaagcctgaataatggtcatgccttgaattgactcattcatttttgcgttaatgtcactgttgatcgagcggattttttggttgtaatatgacgcatatctccggtatatgaccgaccacagccagataatcggcacaattgccagacatacaaacgcaagcttcacatcaagcagaaacaaagccgtgaatatcccgaacatatagattccgcttgtcacaaatgttgaaagcactgtgacatataaatccctaatagcctccgtatcattggtaatccgcgcaacgacttttccggccggaaggttgtcaaaatagcgaatcggcattttctgtatgtgcgaaaacacgtcctgcctcatcttttgaataatccgattggcgctcatctgcagcagataatgctgtccgtattgaaagaataccgaaaacacaagcaagcccccatacaggcagatcagtaacaccattccctttatttccggctgatagaactggaaaagttcctgcttagtcagcttttcggcagcatatgcccggctcttgtctccgtttgtgatcgtcagcttcccgtcagaaaccgttctattcccgtcgaagctgacagcctgatcaacaaaatagaacgccattcccacttgataaatatgcgcttcttttgcttttgaaacaggctcctgcaatcggtcctctctgacatatgagacgccgtgaaactgaacggcatttttatctttttccgcagcttcataccatgttttctcaatgccgaggatatggtcgtctatcatttttttgccaataaagggcccagtcagttctgcaccgacggcaacagttagcaaaaggacggctgtgatcagcaattttcgataaagaagtgcgtatctccataacgtttttcctattttcatgcccctgctcccccttcttccgcagtgaacagctgctgtctttcatattgttcccggtaccacccattattggccagcagttcttgatgcgtgcctctctcagcaatgacgccgccgtccatcacaaggatcaggtcagcgtgctctaccgcggataatcggtgtgtcaaaataaatgtcgtttttcctttgcggttttctctgatgttcttgataattgcagcctctgttttggcatctacagcggaaagtgaatcatccagaatcaagatttccggattcgccatgagtgctctcgcgatcgaaattctttgtttctgcccgcctgacagtgccacgcctttttcaccgaccattgtctccagaccggacggaagcatgtgcaaatctttttcaaaatgtgcttcggcaatggcttgctgaacctctttatcagttgcatcctgttttccgtataaaatattttcttttacagtccgtgaaaacagtaaatgatcctgaggcacatatccgatccatccgcggagacggtcaagagggatttgctgaatcggtacacctgaaaatgtaatgctcccttcacctggaggatactggcgcaaaagctgcttaataattgtcgtttttccgctcccggttttacctgcaatcccgacagtctgcccttttcgcaccgtaaatgaaatatcctgaagattgtcacttgttgagcttggatatgtaaagctgacatgactgaaaacgatatctccaggctctttaagatcagcgggctgttttggatctgtcacatccgtttcataagaaagagtttcatttacccgatctaatgacgcattgccgcgctgcatcacattaatgagttcaccgattgcaaacatcggccaaatcatcatgccgagataaacgttaaaggacactaactctccaagcgtcagctcgttccggaatacaagaaacgctccgtagccgagcccaatcagatagcttgcgccgacaagcagttttaccgtcggctcaaacagtgaatcaataaaagccactttcatatttttctgataaacatcagcggtcatttcattaaaccggcgaacatcgtttgtttcctgaacatacgcgcgaatcacccgcacgcctgaaacagattccagcactctgtcattcagcgccccgaacgcgttttgggcctcagtaaaccgctcatgaattttacttccatatagactgattgcaatcgccatgactggaagcgggataatggcggcaaaggtcagcttccagctgatcaaaaaccccattgtcaaaaagatcgtcatcataaacatcgtagaatcaactaacgtcaagatgccaaaccctgtggttaaactgacggcctgaagatcatttgtccctcgtgccattaaatcgcctgttcggtttttttcataaaacggcggcgacatagtcagcaaatgccccatcagcttcgtacgaagaattttctccatcagattcgctccgccaaacagctgatgcatccaaaaataagacatgatatacacggccgccgtcagcacaaaaaagataccgatataaaacagcagcccttccgcagtaaatgcccctgctttcatatcatctatggcgttccccaagagcttaggcggaaacatttcaatgacattgactgctaataaaaggacaatcgcaatcgtatagcgcagccagtacgccttaaaaaaccagccaagctttttcaaaactgaaaacatctatccccatctcctcatcagccgccttctattttttccttgcagcttttttcatccagtttggcacgaactgccctcgcctctgtatttgtcttcacatcccatacacctgtctttccttagattttgtatataaaaaaggcatgaagcgtcagctccatgccttttttaaccgatatgttacgcacagcgcttttcagcgcgcggtccgacctaaaaaaccgttcacgaaaacagaacaaaaggtttgccgcgccaatatgaaactgtttgataaacacgcaaattccttggcatagcaaaccctccttccattctgatttcatctttttatcatcatataaacaaaaccttttattgtcaatcattacttgaataggaaaaggttaattgtgctcaaattcgggtagtagtgttgcaagacgctttgaaagggtgagaaggatgttccatgctgaccgtatcattgttgcgtttgacggaagtgaaaatagtaagaaagcgcttctgacagccattgatcttgctaaaaccgtaaatgccgctattaccgtcgcccattcacatgatatgaaagacaatcagaccgtcatcgacccgcccagacccgcagctgaggcaagctatatcagcggaggcatgacaagtgttcctgatccgctgatatcggatgtaacatcacctgagccaatgatctatgaagaccgtacggaagaagtcatcgccgaagccagaatgatgctgaatgaacagcaggcagatggagatatcgatatattagaaggcgatccggctgaatcaattatcgagcatgcaaaccgcatttctgccgatatgatcgtaaccggaagcagagaccaaaacaggctgaaaaagctaatattcggaagtgtaagtgaaaagctttcagcgaaatcggatatacccgtcctgattgtaaagtgagcacgccctgtgctcacttcttttatattcataattgtgaaaaaacatagattttcgtttttttctgttataatgctttcgtgcccaaaagcacaaaagcattaaagataaatatggggtgttattttggattctcaaaaaaagctgacgtttccgttagccgtcggtttatttatattcatgttgtgcattattatttcttgcttattcttgcttcatgtagaacctcatatcccgctgtttttaagtgttgtcatgctttcagcagcagctttatggtttggatttccctggaagagcattgaaaaagggattgtagacgggatcaaaaacggcgtacagccgattattgttctagcgctgatcggcatcttaatcggcgcctggatgtacagcggcgcaataccgactatgacagtttatgccctatcctttattgaaccaagccaccttctgttgactgctttgttttcatgtatgatcatcagcacacttgttggctcaagtctgacaactgtaagcacaatcggagtagcgctgatcggcgtggcgagcgcggctggcgttccgcttgaatggacagcaggcgcagtcatatgcggcgcttgttttggggataaaatgtcgccgatgtcggacacaaccaactttgcagccggaataggcgaaataccaatctttgaacacattcgccatatgatgggcacaaccattccagctttgctcatcactgtcgttctgttttactttctcggttcatcagtgtcagcggacgctgcttcaaccgataatattcagcaggtcataaccggaataaaagatgctgcaaacgtgacaccgtgggcccttctttctccgctcttagtcgttttgctggcaatgaaacgggtatcagtaatccccgttctgactgccggaattatttcctcgggaattttgactgctatttttgtaccctacagcagcctgcaggcgtttatgacagctttacaaaatggcacaactttcgaaactgacaatgaggcagccgctaaaattattaacagaggcggactgcaatccatgatgggctctgtctctctcattatgattgcttttgcactcggcggattgatggagaaaatcggattgatttctgcactattggaaggcgtcatgaaaggcatccgctcaaaaggccgtcttgttgcagcaactgtctgctcaagcatcggcgtcaacttggcaacgggcgaacagtatttatcgatattaataccgggacaatcatttaaatctttatatgacaaacgaaacatccagcgaaaatttctgacaagatcattagaggacggcggaacattaattaacccattgattccttggggcgtcagcggcgcatttatggcgagcgcacttggtgttccagtcatagactacatcccatttacgttcttcctctatatatcgccaatgatctccattttgattggatttgttaaaaaataaaaagagccccgctgtaaaaagcgggctcttttcttcgttcatttatgaaatgctagcagcctgttgaatgctttcttgaaaagcagcctgaagctgtttggtcaccggtccgggtttcccgcttccgatcgattgtccatcgagcgtcacgaccggaataatttctgccgtcgttgacgaaataaagatctcttccgcctgtttcaactcttcttcactgacaggagtctcatccagtttgatcccattcttctcaatcagtcctaaaatattcatccgtgtaattccattgagaatgagccgattagccggatgtgttcgcactgtgccgttgataacggcataaacgttagaggatgtaccctccgtaacaacgccgtccctaagtaaaatggcttcaaatgctccggcttcataggccctttgcttcgtcatgacattatacagtaaattcagacttttgatatcacatcttaaccagcgaagatcctcatctgtaatggccgccactccgtatgcctgctcttgctccggttttttcaccgtaaacgtataggcagtagtctgcggctcgaggccggcttcatactggtgttttcgcggggccacacctcttgttgtctgaatgtataccgctccctcactgaccgcattttcctgtacaagcttttgcaggtcccactcgagatcttctatactgaatggcagtgaaattccgatttcagcagcacttctgaaaaaacgctctgcatgctcacgtaagccgaacaatactcctttgtacaccctgatcacttcatagatgccgtcaccaaactgataaccgcgatcttccaaatcgattgatgcttcactgcgcccaatcagccggccattgactaaaaccttcataaaagccctcccttttcgagatgtccctgatgtcattcaagctgtcattatcactaattctaccatattggacaagctgaaaaacagaaagatcaagagatctatagcggaaaggagtttattttttccttaaaatctgacatttcgacaaattttctatgtgctttccagttttattcctgtatacttgactggtaatacataggttgtaaacataaggcatcttcataagctgcctgctgtacagcattatgtagagattttatgccaatggagagattgttatgcgacaaacgagaggagaggcttctccttctgcagtttcgcttgcttttaaatttgcaagtttagcagttttatgtgtgctgcttttgcttatggtgattttgggttattccaacagttcaacgaaagcaaaggaagtcactgtcacaacaaacggccagcttcgagatgagaaggaaagccttaagctgaaaaacgactcccccgatctcctgataaaacatctgcagacaaagcagaacatgggagataaaacggtttacttaaccttcgacgacggcccttcagccgttacaacccgcttgctcgacgtactgaaaagcgctgatgtaaaagcgacgttttttatgctgtcaccgcggatgaacgaattcaagcaggctgtgaaaagagcagaaaaggaaggccacgcactcggtttacatggcgttacccacaataacagattgttctatcaaacaccgacatctccgctaaaagaaatgcaggaggcgcgtgacacgctgcaggacattacaggatataaaaccgatcttgtcagaacgccatacggaagcaagccgtcactaaccgcctcacaaattcgcaatctggagaaagatgggtttgtgtactgggattggacgatcgacagcatggactggaaataccggaattcacagtatgtgaccgccgtattacagcagcttgagaatatggaacacagctcttcaagccgcccaaatgtaattctcatgcatgatcttcctgctactgtaaatgcgctgccggtactaatcaataaattaaaagaaaaaggctattccttcggagtgttagaggacacaatggttcctgttcatgaataaaaaagtgaggcgcataaagcggctcactttttcatgcccaaacttcgggcaaactcgccgattttttgatggatgaccatgtcaaacaagctgtcgcaatacgttggttcaaggtttatgatgactttcttcatgccgggaatcaggcttgcatcctcaggcacaaatctagccggagccacttcgagagacgtgccgataaccaataaaagatctgcttgatccagcttttcataaagggtgtcaaagtgcatgacggcatcgccaaagagaacaacatcggtttttaataccgttccgcaaatgtccccattgtttccggccgccgtgcactccggcacctcccgctccagcaaatggggaagatcatatcgggcgccgcatgccggacaagctgctgtctggatagaaccatgcagttcgtacacatgcctgctccccgcttttttatgaagaccgtcaatgttttgcgtgaaaatatcgacctgcttcccttgcttctccagctcagctaaaagcaaatggccttcattcggttcaaagctgccgctcattttcatctggaacaattctttgaatttgggccaaaacagacgcggataacttaaaaaataatcaaggctcatcgcttccattcttgaggcatcctccgtccaaatgccccctgctgaacgaaagtcggggatccctgattctgtgctcattcccgctccggtcagcacaacaattctctgtgcttcatgtagaatacttttgaatgtttccaactcaacaccgcctttttctcttattttaccatgaaaaagactccgcctctgtcagacgaagtctctcttttaagcccgttccttttcctctttatttagattcacctggaattggtcgctttcgtgcttttgcttgacaacaaccatttggccgggatatgcaaactgaacgccttctgcacctaaaatctcaataattttatagttgatatcctctctaatattaaggttttcagcccaaaccgtcgtttttgtatagaagttaaaaaataaattgtagtagctgtcggcaaacgtatcaaagttgaccatgattatttcattatcaacgccctcatgctctaagagcattgttctgagagaatgaatggagcgttcaaggttctcaatcggcgtagcgtaggacacatggatggaaaacgtaatctggcgtttggtcattcttgtccagttcgtgatcgcttccatcgacagcgtagagttcggcaccgttacaagcgccccctgtgctgttctgaatctcgtgctcctaaaggtaatatcctcgactgatcctgttactgtcgacgtctccacccagtcaccaattgtaaacggcttttcagtaataatgataataccgccgaagaagttgctgatggtatccttcgcggcaagcgcaaaagccagtccgccaagaccaaggcccgctacaaatccgttgacatcataattgaattcctgagcgatcacactgacactgagcgcaatgatcacaaaacggagcaatttggataaaaacggggccagaatgtcatccatgtcaagctcgaagcgctggttcaccttatggaagataaacgacgatgttgcggtcaaattacaaagaccccaacacaagagcgccacaatcagtgagcggtatattttgctgatgaccggcatttgctcatctaaaaacggtgaataccggatcgctaaaaacagcccaagggcaacaaaaaaccatctggccggcttatcaaacgccagaaccacctgtttaaaaatttctgttttcggccggtttgtcaaattaaaaagcaggttaaaaaaatatcttgtgaataattttctaagtataagaaacaccagcaaaatcgccaagctgatgccgatttgtatgatgttatcaagcgtaaaatactgctgcagataatccggcatgactgtctcccctctatcccaatcaattgtttattatactaaaatattcgtaaggatgttcatttaaatgtcttatgcagcacaaaaccccggcgaaacgccggggtcatttctcaattcatctatcagccagattcaatagggacagtcacttaccttttttcgtttgtgtctgatcaaggagagttgctttttgcatttcagcatccgtttcggctttaattctttcctccactctgattctcccttttcccatgatctcgcctccttttttgctattataaaggatcatattttgttgtgaacatgtcgaaagacctaattttctgacgaaatgtgttctgatacgctgagtgtctttttttagttatacgcattcctcagcccggaccattccgatatggcagaaaaaattcaccagtttgtatcgcggtgcatatatggatttgatacaataacagaaatgcccatacgaggagctgacttagcttgtacatcattgcccatcgcggagcatccggctacgctccggaaaatacgattgccgcatttgaccttgcggtgaaaatgaatgcagatatgatcgaactggatgtccagcttacaaaagacaggcagattgttgtgatacacgatgacagggttgaccgaacaacaaacggatcgggctttgttaaggattttaccttggaggaattgcaaaaactcgatgcaggaagctggtacggtcccgcttttcaaggagagcgtattccaaccctggaagcggtgctcaagcgctaccacaaaaaaatcggccttttaattgaactaaaaggccatccgtctcaagtcggaattgaagaagaggtgggacagctattagggcaattttctttttctatcaataatattgttcaatcctttcagttccgctccgtccaaaggttccgcgagctttatccttcgattccgacagcggtcattacaaggcccaactttggcatgctgtccagaaatcagatgaaggccttccgctcttttgcaaactatgtcaatataaaacacacacggcttaaccgtctgatgatcggctccatcaataaaaatggcttaaacatatttgcatggactgtcaacaatcaaaagacagcggcaaaattacaagccatgggcgtggacggcatcgttacagattacccggatttcatcataaaggatggcaaacatgaaaatatatagcgcggtttttatcggaggcgcgcttggcgcctgcctccgatacggattaaacttatggatacacaccggtcagttcccggcggcaacctggctggaaaatgcggcaggcagccttctattaggcattttgaccggattttttatgatcggggcaaaacggcctctgctgtcggcttttttaggcaccggcttttgcggaggcttcacaacaatgtccacgttttctaaggaaacagtgatgcttttgcaaggacaaccctcattggctcttttatatgtggcagcctcattgatatcagggatcatatttgcactgattggtgtttttgtgggacggcgcatagcaggcattcagcaaagaaaggggctgcaggaaaaatgacactagcgggtattttcatagggggcggacttggcgcaatgcttcgcttctggcttggcaatgtcataaccgccaaaaccaaaggtctcagcctgcccattggcatactgacagtcaatattctcggagctctcgggctcggaatatttacaggacttcacgttgcaaatgcttcggtctcgcttatcattggcacggggttttttggcgcctttacgaccttttccacattcagcgttgaaactattcaactccttatggccaaacgtgtaaaagaaagcatcttgtacatcgtcctgacactttgcgggtcgctttttgcattttggtgcggctggacaatcacaatataaaaaaaccttgagcttatttctcgctcaaggttgcactgttcagcatcacaggctcgggcagcggcagcttgtggtgcgccgtaatcccggttgtgttgccggcttcttcttttatatcgatttgcttgattaatcggccgtccatcttcagcacctttatcgtatatgaaccgatgcgaatggattcaccagcctcaatatcgatgttttcttttaatatcagcccgccgatcgtatcgacgtcttcttgaatcgatgcgccaagaaggctgttcacctgatcgatccgaacctttccatccatcacataatggccgtcgccaagcttttggatcagcggctgttcatcttcatcaaattcatctcggatctctccgacaatttcctcaagaatatcctctgtcgtcacaagtcccgaggttcctccgtattcatccgacaatatagccatatgaatgcgctcgcgctgcattttaatcagcaagtcatgaaccgggatcgtttcaatcacttcgatgaccggcctcacatacggatggatcgtcatcttcattcgttcttcttctgtcataaacagcaaatcagaaaacaaatgcttcgtattgaccaaaccgagcacactgtctttgtctccatctgtgactggccagcgcgtgtatttttccttcagcatgacttcaagcatctcggccatcgtcatctcagttgacacagcagccatttccttccgcggtatcataatttctttggcgatccgattatcaaattcaaaaatcttattcacatatttatattcagacggattaatctctccgttttttaaactctcagataacagcatcctgagttcttcctcagaatgggaaccatcatgttctgacgcaggcttcaaaccgaacatcccgcataaaagccgcgccgatccattgaggatccaaataaacggaaacaggagcaaatagaataaacgcaaagggcccgctatcagtaaagtcagctgttctgccttttgaatcgcgaccgttttcggggccagttcacctacaacaacgtgcaggaacgtgatcaagccgtacgcgactgcaaaagagactgcatgtgaaaccgagtccggcaagccgagcggttcaaacagtggatgcagcagccgttcaaaggccggctcacccagtacgccaagcccgattgatgtcaatgtaatgcctagctgggatgcggataaatattcatccaaatctgtaatgacacgccttgcgagtatcgcccgtttgtttccttctgtgataagctgatctattctggatctcctcactctaacaatcgcaaactcgcttgcaacgaaaaacgcggttaaagcaatgagcacgccaattaaaatcagactgtcaatatcgtccatttaaccctatcctctcaacaaaggataaggagtcacctcctgatataatcatttttccttaacattgaggtacgcggtgtattgttgcctaagcagagggccccatcataccacctccaaaagtcaaagtttgattataaattgtatattttattgtaacacaactcattccaaaaatgatttttaatttttagacttttatcatgaagaaagccttaactgcatgcctgcttgtcaattctgcgcctgtctggattggaagaggaaggattttgcggatataaaaagaaaacagccttgaaaactgttttcttttctttgccttcttaagcaaaatctttatataaagaaatgaaaatgtcccgtgagtttttaatctgctcgatcggcacactgaaggataatcggaaatgcccgctcattccaaaaccgctgctcggcacaattaataatttgtatttttgggcggcatgcacgcaaaatgcaacttcatcttcaatcggcgatttcggaaaaacaaagaaacctccctttggcatttcaaattcaaaaccggcttcttttaaaatgtctaccattaaatcccggcgctctttataagcgctcgcgtctactcttaaatcatccattcgtgccacagcccgctgcatcatgacaggggcattcacaaatccaagcgttcgattacaatacacaaaagcgttgatcaaaaggtccgcatccggcattcggctgtccaatccgatatacccgagccgctctccggctatgccgagatctttactgaatgagctggccaatatcacacgatggtacgattgaaacggatttgccagctcttcatcatagattaattgactgtacggttcatcaaacagcacataaatcgtctggccgctcttctcttctatttcttttaataaagcgcctaaatcgtctatatttttctggctgagaacagtgcctgtggggttatgcggtgtattgagaatcagccctttcgtctgtggagtgatcgattgccttaccgcttcaatgtcgatctcaaaccggcttgtcaacgggcagctgacggcttttcccccgtagttctcaatatacaacttatattcggcaaaataaggtgcaagaataatgacctcttccccagggtttacgatgctttttaacgcaacattcaaagcgcctcccgcgcccaccgtcatgacgatgcgctccgctgagaaatcagcttcaaaacgcgagcccagaaattgcgcgactttttctctcgctgcaagaagcccttggttttgtatgtatccgtggctgcctttttcagcttcctctattaacgctctcttaaaagcttcaggcggttcaacaatcgggttgccgagtgaaaaatcaaatacctggtcttccccgaactccttcttcagccttgcaccttcatcaaacagcttgcgaatccatgatcctttatttaagttttcttcaacttcccgggataacccagccaatttcatctgtcccttccgcatataaaaatttgaaaattctatcttcctatgttacttcaatcagatgatgaattccacaacttccaattccggtctaaaaaaaacaataaacttgtgcaagacaccgttcatatattaaactattctcataactataacgtgatggttgggagggatatagatggggctgagacttatcgcatcagtgaactagcggcactcgccggagtaacgaaacggacagttgattattatacgaatctcggtctgcttacgccggccagatcctgttcaaattaccgttactacgacgaaaatgcactcaaacgacttatatttattgtagattgcaagaagcagcgattggccctgtccgatattaaagatcgactggagaaccagtttccctcttcagctaaacttgatgatgaaattggaaatctggcattagaaattgatcatatgaatcaaaacatctccggaatcttgcatcggtttgaacggctgaagcccgaggatcgtgacaagctgaaaagcaaactcccgcctgaaaagctcgccgtgttccaatcatttatgctgctgttaagttaaaaccattttatctaacaggaggtgttaccttcattctcattgctagagtgaaggttctaattggacatagtgaatttgattttagttgctgttttaatcgccctgacggcatttttcgtggcatctgagtttgccattatcagaatcagaggctcacggatcgatcagctgatcgcggaaggaaataaagcagcaatagccgtaaaaaaagtgaccacgcatcttgatgaatatttatctgcgtgtcagctcggaattacattgacttccatcggattaggggttttaggtgaatcaacgatcgaaaggctgcttcacccgcttttcgtccaaatgaacgttccaggttccctttcacatgtcatatcgtttatttttgcgtatgccattatcacgttcttacacgttgttgtcggagaacttgcacctaaaacagtcgctatccaaaaggcggaagcagtgtctatgctgtttgcgaaaccgctgatttggttttaccgcatcgcgttcccattcatttggcttttgaacaattccgcacggttattgaccaaagcatttggcctggagaccgtttcagaaaacgaactggctcactcagaagaagagctgcgaatcattttgtctgaaagctataaaagcggtgaaatcaaccaatcagagtttaaatatgtgaataaaatctttgaatttgacgacaggctcgcgaaagaaattatgattccgcggaccgaaattgtcagccttccgcatgatatcaagatttctgaaatgatggacatcattcagattgaaaaatatacccgctaccctgtggaagagggcgataaagataacattatcggggttattaacattaaagaagtgctgaccgcctgcatcagcggtgaggtatctgttgattccaccatttctcaattcgtcaaccctatcattcatgtcattgaatctgcgccgatccaagacctgcttgtcaaaatgcaaaaagagagggtccacatggccattttgtctgatgaatacggcggtactgccgggcttgtgacggttgaggacatcattgaggaaattgtcggtgaaatccgcgacgaatttgatattgatgaaattagcgaaatccgcaaaatcggcgaaggccattatattcttgacggaaaagtgttaattgaccaagtaaacgacctgctaggcatccatttagagaacgaagaagtcgatacaatcggcggctggttccttactcaaaaatacgatgttgaaaaagatgattccatcatcgaagagggctgcgaattcatcattaatgaaattgacggccaccacgtcgcatatattgaagtgaaaaagcttcaagaagaagaacttctggagacagctaaccagcaggaagcataataagaaaagcaccttgtatagggtgcttttcttattttcacagtttcaggacaatctctcagaacgccttatagctgatcaagtttattctctagttctttaatccgctgattcaaagcctctgtcattgctgcaagtctttcctttgaaggcaggtgggcaaaatcagcctggtgaagaggctcaccgataatcagcttcatttttccttttttgaataattcttttccgcttgaagggccctgatatgcagcggggacaagcggcgctttccccatttgcgcaatcgtcaccgcacctcttttcaaaggcacatcctcagaggttcttgttccgcttgggaagataccgacgatctctccttctttcagcagcttaatcggcgttttaatactgcttggcccgggattttcccgatctaccggaaaggcatgaattttcttcagaaacgaaccgatccatttattttgaaaaagctcttttttcgccatgtagtgtatttgataaggaagaatcccgactccgagtgtaatcacatcaacccagccggaatgtgtacacgcgatgacaaaacctgaatcggccggaaggttttctttgttatacaccttcactcctccgcgaagagaaagaataacttttaaagcatttgcacaaaacttatacatatcgcacttcctttgtcgtaatcaatgattctttctgtcatctattataacaatattttttattacctggtactaatttttaagatttctctcgtttaaacgccaaaaagctgaggattcgccctcagcttttgttatatttcctctctggtcggcggggccataaactccggtccgacagggtctgatatcgtattttccaatatagtattgatatctttctgatcttcactgttcagcgtccagcctgtaatctcagatagggcctcaagctgcccaggctttcttgctccccaaagagcgatatccgctcccggctgatctaagatccatctgacagccaagtgaatcactgattttccataacgtgtcttcgccagcttatccaattgattcacagcagaaagatactctttaaagcggggcttctggaattttggatcgtgattacgcagatcatcgccctcaaatgtatattcttcagtcattttgcctgttaacagccctctgcataaactgccgtataataatgttgttatcttgttatctttcgcataaggaaggacactctcttccatctctctttcaaacagattatatggaggctgaatcgtatggagaggtgcgacggcgcgaaatgtatccatttgctcaattgaaaaattgctgacgccaatcgcccggatttttcccgcatcatataattccttcatgacttcagccgtttcttcaattggcacaagcggatcgggccaatgcacctgataaagatcaatatagtctgtttgaagccgcttcaaagaattctcaacttcctctacaattctcgctctgttcgcatggcggaacagctggttgttcttccagtccagagccgttttcgttgcgagaatcacctggtctcttttgccgtactctttgattgcctttccgacaatttcctcggactgcccgaagccgtaagccggtgcggtgtcaatcagtgtaatcccctgatcaagagcggcgcggattgtttcaatcgatgttttttcgtcagtgcctccccacatcgttccgccaatggcccatgtgccgaggccgattctggaggcttctattcctgtatctgctatactggtatattccattgtgccactccttcactttttcactatcttttcccctctggaaaaaatgttaaacctttctccgcactatcttttgcggccatttttgggtactatatagtaatggtgtttgattaggtataaaaaagccgtttgcatgtaatgtgcaactttaaacctttcttatgcgtgtataacatagaggggagaaaaggcagtgacgatcgatgaaatttaccaaatgtacatgaatgatgtttacaggttcctgctctccatgacaaaagacaagcatcttgctgaagacttactgcaggaaacctttatgcgggcatacatacacattcactcctatgatcacagcaaagtaaagccctggctttttcaagtggcgcgaaacgccttcattgattacgtcagaaagcataagaaagaagtaaccatttctgatgacttaatcggaagcctctttcaaaatgctgttcaaagtcctgcccatcaggtagagataaaggaagtgctgactggttatatgtccgagctccccgataattatcgggaggccttaacgctatattatttaaaagagttaaactacaaagaagcatcccatattatgaatatttcagaggcgaattttaaaagtgttttatttcgtgccagacagcggctgaaagcactttataatagaggtgttaatgatgaatgaagaatttaaaaagcgttttgatcaatataaaaatggggaaatgagcgaccaggaaatgactgcatttgaggaagaactcgagaagcttgaagtatatcaggaactgattgacagcgaactagaggacgataacgattgggatctcagcatcagtcctgaaaaacaaaaagcgattttagcctacggcaaacgcaagtcttatttgcgaatttctgtgcttgccgtcatttcgacattgatgattttgccgctttgtacgctgggaagctacctctattacggaatgggtggaaaacacagcaccggcaatgagtttatggaaactgccgcagtcactgtagccctgaccatgccgaatgttcttgttgatacttccggactgaaaagccaagtgaagctatttggaatgaatacggaattcccgctgcaaaagcagattggcacgaagacggctgccgtagggaatgaacgggttgaaatgttttataacaaagtaaaagcgccggcagtaaactactatgacttagaagtgaataaaaccggccattactttacacatccttcaaacaagtctgaacaaacgaccgcaaaagcagaaaaaacgttaagcacattgcctgaaggaacggtatcagaggtctacctttcatatgaccgtgcatatccgacaaaagacgtgtataacaaattcaaaggctatgatgtgagctttttgtggaacgcaatcgaaacagagaaaaacacaaataagacagcttccacagaacctcttggctatcctggaaaggattcaaagttcttggccgcccttaatacaaaaggcaagtcgaatggcgatcagtttatcaacgccctgaaattcatgtccaaacacgaaaaatgggctcaggtcatttcaaaacggaaagacctgaatgtagataaccgattagattatgtagagaaaaacggtgtcaatgtatacggttcggtcgttacagggccaaccaaggaaatccagcgcatgctgaaaaataaatctgtaaaatcagcgaatgtcggcgaggtggaattatggaactggtaagaatttttaaagaacacaatgtattcggctggatctctgtcgggacagcggttctgtccctgctgttgctgaatttggccattatcagcaacgtcacgttttattcctatcaaatgcttccgttcgccatggctgccgttccgttcggcgttgttgaactcttcatcaagagagggcgcacaggtccaggcctgctcggcgtcatccttaatctctttgtgattatttgtgtgtataccattgtatctgtagatacgaatttacagtttggcttttaaaaaagacgccttttcaggcgtcttttttcgttataccggttttcggaacaaataactttctatagtaaaacccattttatctgtataaaatcgatgtgcgtctttacgctgaaggccagatgaaagactgacaaaaccgagtccggcttttctcgcccagtctgaggcataatccaaaagcattttgccgtatccctttgatcggcaaggtgccgttgtaacaagatccgcaatccacaagtgctctcctttatgaatggaaactctcggcagagccccgcacagcgctctgattgctgtattttcatataaggcaaacagcatatacgattctttctgcacacaggcttcaagcctttgtaaatacgtctctatatccagttctgttctcaattcactcataatcggatacgactcagcccattcttctttcgaggttaattgtttcatatggatcatcttctcaatcccctttcctttcgttacaatgatcatagctaataaatggcatttgccaaatagccaatatcagaaaaaatgaccatgccagctacaaaggagacatgagatggatattacgccgtttcttgataaaaagagcaaaacaccgctgtatgaacagctttataccttttttaaacaagaaatttcacatgcgcgaatcacaaagggaacaagacttccgtcaaaacgcaggctctccagcttgctcgatgtcagcacggcaactatagaacgagcttatgagcaattaactgctgagggctatgtcaaaagcaagccgaaaatcggctggttcgcggcggaagtagaaccaggattcccgacagctcctgaccattttcagcagtctgtacagccgggattacatcaaaaaaacgcacctgctattgacttccatcagggcagcgttgatccgaccctctttccctttaacgcatggagaaaaagcatagtaaaaagtcttgatcgctattccggatcgtttcacacctctggcgaccctcaaggagaatacgaactcaggcacatgattgcccgattcgtcaggctgtctcggggagtaaattgtgaacccggccagattatcatcggcgcaggaaccaccgtgcttctgcaaaatctttgcctttcgctaaagccaggtacaaaaatcggctttgaagaaccgggctttcaccgttcaagaaggatgtttgaagcaaatcacatggatgtcactccgatttgttctgatgcagaaggcgtcctgccggatgagctctaccgtcagaatccttatctcatgtatacgactccttcgcatcagtttccgattgggaccattatgacgattacccgcagacaggagctgctggcatgggcggcagaaacaaattcattcattatagaagatgattacgatggagaatttcgctacagcggccatcccattccgtctttacagggtcttgatccgaatggcagagtcatatatctgggcactttttcaaagtcacttctgccttccttgcggctcagcttcatgattgtgccccctgaactcatggaaccgatccaaaacaatgttcagttaatgaagcagaccgtttctgcccactcgcaattggcactggcagacttcatcgaaaccggagagtggcaaaaacacataaatagaatgagaagcttataccgaaaaaaacacgctgtcctgttagaagccattcgctctgaactgggaaacaccgttgagattctcggtaagaactcggggcttcacattctgctgcgccttttgtttccagcaagtgaggaagaagcaatacaagcagccgctgaccacggtgtaaccctctatcccgtgtctccctcatatatagaacagacgccttttacttctgtcttaatcggttatggcggtttgtcagaagaggacatcaggctcggcatccaaaaactgaaaacggcatgggcaccgttgatatcatcttattaaataaaaaacaggccccggaaacggagcctgttttttaaaatgataaaattccgattaaatttaagaacacgataataatggcaagcggcacgataaaacgaagcaaataaaaccatgtgtaaaagaatgctttacctgcatttgatccatttcgcatttcagccaagagttcgcttttcgaaattttcagcgggataaatagagaaattaacagagcgcctgaaggcatcaaaacattgctgacggtaaaatcggcaatatcaaaaaacgttttgccaaataggtgcacatcactcaaaacgccataagacaagcagcatgggattccgaccaaaaagatcaaaagcccgctcgtccatgacagtttttttctcttcttttcgtccccttttccgattgtggcaacgataatttcaaccatcgaaaatgctgaggttaaggctgcaaataaaaatgcaacgagaaagccgataaaaaacaatgtgccgaacggaagctgttcaaaaacggccggaagcactgtaaacagcaatgtcggtccttcatttggctgaaaaccgaatgagaaaaccgccggaaaaatagccaaacctgccaagagtgtcacaatgatattcatcaagacaatggaggctgccgaacgagggatattttgtgttttcggcaaataggagctgtaggtcaccatcaccgaaacccccagtgttaacgtaaagaaggcctgtcccagcgcgaataatatggattccggagtcagatcgccgaaatgaggcacaagcagaaactttacgccttccattgcaccattaagcgtaagagaccgaagaacgagcagaataaacaataaaaacaaaatcggcatcatcaccgcgcttacccgttcaatccctttttgaacccctcttgcgacaacgagtacagtcagtgccataaagacaagctgagccgcgagcgtctgcaccggattttggataatagaagcaaaaagagcgccatactgtgcttgagaaagcccggacagtgatcctgacgctgttttcacgatatacagcaaaatccatcccccgattacactgtaaaacgacagcactaagaaacacgccgctacgccgatccaccccgtaagaaaccaagctgatcgcggcgcttcttttttatatgcatcaatggcattcgtctggttccgtcttccaaaaataaattcccccaccaaaagcggatagcctaagaggatggtaaataacacgaagataagaaaaaaggctcctcccccattggtccccgctacgtaagggaacttccaaatcgcgcccaagccgatagccgagccggccgctgccatgacgaaaccaattttcgaagcccattggactggtttttgctcagacaataaacgtcacttcctttccagcctatattatctcttatttttgtcttcatttctatagattcatttgccaagaacagaaaagaggcggcctgtatggccgctctctttatcaaaaggttattgatttaattttgaatgctttcttgaatacaggaaatagattaccaagccgattaacagccacactaggaagcggacaatcgtcacccatcccagatttaaaatcaagaacaggcagaacagaatcgccaggcctgggatcacgggaactcccgggcatttaaaagctctcggaagatcaggctgtttctttctcaaaacgataactgccacagaaatcaggacaaatgccgacaacgtcccgatgttcaccagctttgcaagttcatccagcggaacaagtgagccgagaagcgccgacatcgttccgaaaaaccaagtggctacataaggtgttttgtgctttggatgcactttagaaagtgaacccggcacaagtccgtcacgcgacatggcaaacatgacgcgggtctgcccgtaaagcatcacgagcataactgttgtcattcccaacacggcgccaatatcaatgatgcctgccacccaattttgccctgcgctttgaagaacaagagaaaccggatgatccacacccgcaaattgagcaaacgggataaccccagtcatgatggctgatacggtgacatataaaatcgtgcagaccagtaaagagaaaataatgcctttaggcagatccttcgcgggatttttcgtttcttccgcagcagaggatacagcgtcaaatccgataaaagcaaagaatacgagcgccgctgcactgaacacgccgccaaagcccattggcataaacggctgccagttgtgcggcttcacgtaaacggctgccaccgcgataaacagcagaacaaccagtatcttcaagataaccatgatattgttgactctttttgattctttgatgcctaaataaagcaaatatgtgatcgccattacaatgacgaatgcaggaagattaaacagggtaaaggtgcctttcactgcgcccggtgccgctgttaaagcaaccggaagatgaatgccaagccctgataaaaacgattggaaataaccagaccagccgaccgacactgcacttaccgccagcatgtattctaaaattaaatcccacccgataataaaggccataagctctcccaatgtcgcataagtgaatgtatacaccgaacctgaaacaggcacacttgacgcaaattccgcgtaagacagggcggcgaataaacaagccaacgccgccacaacaaatgaaatcgtcagcccgggaccggccgtgactgcgcctgttcccgtcagaacaaaaatccctgtgccaataatggcgccgattccaagcaacgttaaatcaaatgcccctaattctctttttaaagacttttccccgctcgtcgcagcgattaaatcctgaatgcttttcttcctaaaaacgctccctttcattccccttcaactcccgatcatctatttttatatattttatttgaattttctgaattcatgagtaacaatggtcattattcttttttttctactatatttgtactggtcgcgaatcattcctttctcctactcaatattatatataaaattgcaaaaatgaaaacaaaattgttagaaaaatcgacaaattttttattttgaaatttttcaccacacaaaaaaccagctcttgagctggtttttcgttgattacgttgaaataaaacggccgccattcacatgaatggtctgccctgtcatataggaagattcgtcagacgccagcagaacataggcgcctgcatgctcaaccggctgtcccggtcttcccattggggtatccaagccgtgctgtttcactttttcctcagggaatgtcgccggaataagcggtgtccaaatcggaccgggcgccaccgcattcactctgatgcctttatctgcaagcgacttcgccatggaacgcgtaaaggaaacaatcgcaccctttgtgctggaataatcaattaacgccgtatccccttcataagcggtaatcgatgtcgtattaataatggcacacccctcttgcaggtgaggcaaagctttcttcgtcatatgaaacatggaaaaaatatttgtgcgaaaggttttttccagctgttctgttgaaatattgagaatgctgtcctggggatgctgttcagcggcgttgttcactaagatatcgagtttaccaaaatggtccactgtttgctgcacagcttgttcacaatggttctcgtccccaacatctcccgggataagcaggcagcggacattctccttttcgatccgtttgcgtgtttcctctgcgtccgaatgctcgtctaagtatagaatggagatatcagccccctctttagcaaaggcaatagctgctgctctccctattccgctgtcgcctccagtaatgatcgcaacttttcctttcagttttccgcttcctcgataatcctcgtcctctgacagcggcagcggattcatttttgactcaatgcccggctgtctgtcctgatgctgcggttcttgtccttctgtttgtctgtccattgggttcacattcatcactcctagacatgtggttgatactgaacgttaccacacgacagaaatgaataaacgccaaaatatgttatgaaagaacttcctcgggaatggcaccggtatattgcgctgacgggcggaaaatcatgttgttttctgcctgttccagtacatgggcgcaccaccctaccattcggcttgctgaaaaggtcggagtaaacaattcatcgtcaaaatcgatggccctcatcactgcagctgcgtaaaattcaacatttgtgtacagctttcgtcccggtttgtagatttctagcaaacgaatcgcttctgcttctacatgcagcgcaagatcaagatcacggtcattgccggccacctcttctgctttctgtctcaaagcttctgcccgcgggtcttttgttttgtacaccctgtggccgaatcccatcaagcgctctcctttttcgagtttttctttcagatatgcttcagcatgttccttttctccaatgtcttcaagcatttttgtcaccgcagaaggagcacctccgtgcagcggacctttcatcgtaccgagagcagccgtgacggctgacactaaatcactctctgtagataacgtgactcgtgccgaaaaagtcgatgcgttcatgccgtgctccgtggccagaatcatataggtttcaagcgctttcttttttgcctctgaaggctgttcacctgtgagcatataatagtagttttcgacatgtccgtactgggaagaaggtgcaattgcttgttcaccgcgcgtccatctttttctgtatgcaatgatagaaggcgtgattgcaatcagccggattgcttcctctgttttcggatggaatgtgtacgtattttcccccaatgctgaaacaaccgttctcagcaccgacatatcgtccatgttgtttggcagtgattgaatcaagcgctcaatatgttccggaagattccgttccgcagccagcttatctttaaatacctgcaattcttcagttgaaggcagttttccaaataaaatcaaataagccgcttcttcaaagctgtgattcagtgcgatgtcttttgcatgatgtcctctgtaaatcagacgccctttttcaccatcaatatggctgatggatgtttctacacatgtaattccctttaatccgtaatgtaccatttgtattccccctatccttttctgttattatagtaaatataatatttaaaaaataatcaatattttaaagggaattaattaaaaatattaatcagagggagaatagaaatggatttcaaatggcttcacacctttgtgaccgctgcaaaatatgagaacttccgaaaaacggcggaaacgcttttcttatctcagcctactgtgaccgtacatatcaagcaattagaaaaagaaatcagctgcaagctgttcgagcgtaaaggcaggcaaatccagctgactgatgaaggcagggcgtatttgccgtatgcgctcaggcttcttgatgattatgaaaacagcatggcagagcttcacagagtgagacaaggctactctcaaaccttacagctcgcggtttctccgcttattgcagatacagtgcttccttctgtcatgaagcggtacacagcaatgaatacggaaacagaaatggcggttacgattttcgaatcagcggaaatcgcgtcactgattaaagccggggaagcagatatcggactaagctgtttaaaggtacagtcttcttctttaagctgccactgcttatacaaagaccctgtcgtccttgttgccccgcccgataagcgtttcatagaagacaacgaaattgatgccaaagaggtgctcgaacaatacctgcttttgacccacaatcatcctgattactgggacgacttgctccgtcaagtcagaatgacatttccatttgtgagaacaatgaaggtcactcaaacacatataacgaaacggtttatcaaggaaggactcggagtttcatttctgcctttatctacagtaaagcgtgagttagcagagaaacagatgatcagaattccttatcagtctgtacagctgccctatgccggcgcttacgcgattgccctttatgaaaataagaaagaaaaaaagttcttggattttttatcacattttcatttttaggagcaaccaaaacgcctgtgctccgtctaatgaaaaaaacccgttccaatgaacgggttttctctaaaaattagaatcttttcgcaccgaggtaacgaggcttccagtagctgttgttcaggctgctgatttgtacgccgtcagatcctgcatgaatgaaactgttgtttccaatgtaaatccccatgtgagaagggccggatttatatgttgtgaagaagacgaaatcaccaacagacgggctggcaatgctcttcatagaactccagtatcctgcagtgcttgttctgcccacacttgtttgtttattcagtacgtaccaaatgaatccgctgcagtcaaagcctgaagttgtcgttccgccccatttatatggcgttccgactaacgcttttgcatcagaaaccagcttgctcacattaagtgatgtagatgacgttttgctgcttgaagacgatgaagatgaagcaggttttgagctgcttgtgcttgttcctttcaccttcaatacttggttgacatagattacatctgattttaagccgtttaagctttttaatttgctaaccgtagtgccgtatttgctcgcaattttagaaaggctgtctccgctcttcactttataagtagaagttgaagacgatgacacttttgatgagctggagctgcttgaactagttgaacctttcagtttcaggacttgtccaacacgaagcaaatctgattttaagccattcagcttcttcagttcattgattgtcatgccgtatttttttgaaattttccaaaggctgtccccgctctttactttgtatgtagaagaagaggaagaagaactgctgctttttgaacttgtagatttgccgttaatcgataaagtttgtcccacataaataatgtctgaacgaaggtggttctctgatttaattttactgatcgttgtgtcgtattttcttgaaagatcccataacgtgtcgccttttttcaccttaatgctttgtgcagatgccgctcctgcaaataacgtcgatcctaaaacaactgctgtcgtagctgtaatgatttgctttttcatattttcctccccaaatgttaactctatatatatgtatctctttttttaaattaatcttattgatttctattataaggatagattcccatcagaaatagtcttgacttcatgtgacaaatttcttaattattcgttctaaaaaaaagtttttaagggtattaaatatttcattttcattgcaaaggtgacaaaaaacgagtgcttttgtcatgttttatgggatgtttttcaacataaaggaaataaatgaaaaactttcggggtcggctcatatatcggaaaaatgagtgataaagtatattcgaggagagctgtggttatccgcagtttttttatttaaacaaacatatcatgcaaagacagagaggtaaagatttttctgaaaaatgaatgctttacatcaaataaggcaagataacgaaaagcgttttttcatttccttacaaggctttacttattgtttacatgatcaacagccgcatttaacaaagtttccctaacatgataaacggaatacattaaaggaggcatgaaaaaaatgagtttgtttcaaaatatgaaatcaaaacttctgccaatcgccgctgtttctgtccttacagctggaatctttgccggagctgagcttcagcaaacagaaaaggccagcgccaaaaaacaagacaaagctgagatcagaaatgtcattgtgatgataggcgacggcatggggacgccttacataagagcctaccgttccatgaaaaataacggtgacacaccgaataacccgaagttaacagaatttgaccggaacctgacaggcatgatgatgacgcatccggatgaccctgactataatattacagattcagcagcagccggaacagcattagcgacaggcgttaagacatataacaatgcaattggcgtcgataaaaacggaaaaaaagtgaaatctgtacttgaagaggccaaacagcaaggcaagtcaacagggcttgtcgccacgtctgaaattaaccacgccactccagccgcatatggcgcccacaatgaatcacggaaaaacatggaccaaatcgccaacagctatatggatgacaagataaaaggcaaacataaaatagacgtgctgctcggcggcggaaaatcttattttaaccgcaaggacagaaacttgacaaaggaattcaaacaagccggctacagctatgtgacaactaaacaagcattgaaaaaaaataaagatcagcaggtgctcgggcttttcgcagatggagggcttgctaaagcgctcgaccgtgacagtaaaacaccgtctctcaaagacatgacggtttcagcaattgatcgcctgaaccaaaataaaaaaggatttttcttgatggtcgaagggagccagattgactgggcggcccatgacaatgatacagtaggagccatgagcgaggttaaagattttgaacaggcctataaagccgcgattgaatttgcgaaaaaagacaaacatacacttgtgattgcaactgctgaccatacaaccggcggctttaccattggcgcaaacggggaaaagaattggcacgcagaaccgattctctccgctaagaaaacacctgaattcatggccaaaaaaatcagtgaaggcaagccggttaaagatgtgctcgcccgctatgccaatctgaaagtcacatctgaagaaatcaaaagcgttgaagcagctgcacaggctgacaaaagcaaaggggcctccaaagccatcatcaagatttttaatacccgctccaacagcggatggacgagtaccgatcataccggcgaagaagtaccggtatacgcgtacggccccggaaaagaaaaattccgcggattgattaacaatacggaccaggcaaacatcatatttaagattttaaaaactggaaaataaaaaggatgcagaacgctgcatcctcttttttataaatatctgcggtgaacaccttttccgtcgtacgaaaacatgacttccttatcctcaagcacagactcaatgtgcacgcttcttccccaaagctggaataaataaggaagcactttctccaaatatttcaaatccaactctatgccctcataccaatgcttaatatagagttcgttatttttcatataatcgccgtcgtttactgtcaaatatggaaaaccgccatttacccgcatgcttacgagctggtcgcgcaccgacttccactgtttatcgatgattttataatctcggccctgtttttgaaacaaataaagatcctcgcgcatgactaattctttggttaaataattgcggatgaaagagatatcggattcaatctccctgacctcaaacattttctcccggccggagtcaggctgcacgcccattttcttcatttcctccgtcgggttgttgtacctcttttcaatgtcttcaaatattttcagccctaaataataaggattaatgcctgttttggacggctgaacgacacctgcattcagcttggcgaactcgatcgcttcatcagaggttaaatcaagctcacgtataattctctggtgccaataggaagcccagccctcattcataatcttggtttccagctgaggccagaaataaagcatttcctctctcatcatcgttaatatatcacgctgccatggctccagctcccgggaatgctcctcgataaaaagcaggatatctttttcaggccgcggcgggaacggttttttcgattttttcacttgttttttcggtttcttttcatctaaagaccatagatcatcgtaaggcgtggctgcctcttcaatctcctcttcctcatcatccacactccattggagctttggtcggaccaacgacggatcgatatgctcctgaatcgaaaggattgcatctaaaaaagattcgacttcttttatcccgtgaacctgttcatagtgttttatccgttcagctgttgccgccatgctttccaccatatcgcgcttcgtgttttggaaacggcagttgtttttgaagaaatcgcaatgagcaagaacgtgtgcgacaatcaatttattttggatcagtgagttgctgtccagcaaaaaagcgtagcatggatctgagttaatgaccagctcatagatcttacttaaccctagatcatagtgcagcttcatcttgtgaaactgcttgccgaagctccagtggctgaatcttgtcggcatcccgtacgcgccaaatgtataaataatttcagccgggcagatttcatatctcatcgggtagaaatcaaggccgaatccttttgcaatttcggtaatttcctcaattgcccgctgtaatcccttcttctcctccgcgttcaaccgaatcccccctacttggacttatctataatgtatgagcccgccagacaaaagatgatagtctcactcgggcaagaaaaaattcccccggcacattcatctgtttgcttattggataagtgggtaaacacacaccatactacgaaaaaggagcgataccaattgaatgtagcagacgtgttttcttcttatctcagtaagctgccaaacgtaatcattgctttactcgtcttattaatcggctgggctattgctaaaatcattgaaaaagcggtatacaaaggactcagcaaaacaaaaatcgacgacaagctctttgctgggaaaaagccttcacgctattcctcggaaaaagtcataagcaaggtcgtttattttatcgcactgatcatcgtctttattttattctttaacattttgcacctgacaacagtggcatcgccgtttgtcagtatgctttcggcgattgcagctgcgatcccaagcgtgctgaaagccggactcattctgctgttaggatgggctgcagcttctgttttgagcttccttgtcaaaaaaatcgggatgaagctgaacacgagtgacaaactgcgcaagtggaatttggtgtctgaaggaaaagatattcaccaggctgtcaataccgcttcacaaattgtcttttatctcgtgctgcttgtttttctgccaggggtcttatcttctttgaaaatcagcggcatttcaggtccttttacaaatatgatggaaagcgtgctcgcttttctgccgaaattatttgcagcggcgcttatcgtattaatcggatggcttgttgcccgccttgtccgtgatatcattacgaatttccttgcaagcatcggcaccgaaagattcgcggcacgtatgggtttatcaatttacttaaaagacacaagcctttcagcagtcatcggaacaatcgcttatgtgctcattatgattccggtggtcatttcagcgcttgatcagctggatgtcgccggcatttcaaaaccagctgtctctatgctgaatacgattttaaacatgcttccgaacatcatgattgccatcgtgcttgtattagcgggtatctgggcaggaaaatgggtgaaatccatggtgtccggactgctccatcgcgcaggctttgattctgtcttagggaaaatgggcatggaagccggaacgcctgcaaagctgtccttgtctcaagttgtcggtatgattgcgcaaatcattgtcattctgctctttacagctgaggcgcttcaaattgttcggctgcacttcctcgtagaaattgccaccggcatcatcgcgtatctgccgaatgtccttgtcgcagtattcattctcggactcggcctttacgcaggagaattggtgagaaaagtgctcgcaagcatgataaaaggtcaggaattcaagtctttagcgcctattgctaaatatacgattatcgcacttgctttctttatggccctggatcagctgggtgtcgctgcgacaatcgtcaattccgcgttcatcatcgttcttagcggcttcgcacttgcttttggtttatccttcggccttggcggtaaggattttgcatcacgttatctgtctacatttgaacgcaaaatgcaaaacacagaaatcgaaaaaaaccgtaaaaaccaaaatccgccgaatgacatgtaagcaaaaaacatgcacccagctgggtgcatgttttttaattccttttttttcatttttcaatcgattatgataagatatagaaaatgtcttattctgaggtcttattatgaagttaaccaattatacagattattcattaagagtgttgatttttctggctgcagagcgtcccggagaactttcaaatataaaacagattgccgaaacgtattctatttcaaaaaatcatctcatgaaagtcatatacaggctcggccagctcggctacgtagaaacgatacgcggacggggcggcggcatacgattaggcatggaccctgaagacatcaacatcggtgaggttgtcagaaaaacggaggacgattttaatattgttgaatgttttgatgcgaacaagaatctctgtgttatttccccggtttgcggcttaaaacatgtgctgaatgaagcgcttttagcctacctcgcagttttagacaaatacacactgcgcgacctcgtcaaaaacaaagaagatatcatgaagcttttaaaaatgaaggaatagattaagattccttctttttttatgccctttttcccccttattgttaagataatttggctatttttataaaaaggcaaaacgatgagacaaatgtgccgatataaaaaagaaacagcaaatgcaaaatcattgggggaaaaaggagagctaagatgaaaaagaaattagcagcagggctgacagcatctgcgattgtcggcacaactttagtagtgacaccagctgaagcagcaacgattaaggtcaaaagcggagattctttatggaaactggcccaaacctataacacaagtgtggcggccctcacatccgccaatcatctttcgactactgttctgtcgatcggccagacgcttactattccaggcagcaaatccagcacttcttcatctacttcaagctcaacaaccaagaagagcggaagttctgtttacacagtgaaaagcggagattcactttggctgatcgcaaatgagtttaaaatgacggtgcaggaactgaaaaaattaaacggactaagcagcgatttaattcgtgctgggcagaaattaaaggtgtccggtactgtttcttcaagctctagttccagtaaaaaaagcaactctaataagagttcaagctccagttcaaaaagcagttctaataagagttcaagttcttcatcttctacgggaacatataaggtgcagcttggagattcactttggaaaattgcaaacaaagtcaatatgtccatcgctgaattgaaggtcttgaacaacttaaaatcagacaccatttacgtgaatcaggtgttgaaaacaaaatcaagcggctctgatacgtcttctaaagacaattcatccaaatcgaaccaaacttcagcaacaactaaatataccgttaaaagcggtgattcactttggaaaatcgcaaacaactataacctgactgtacagcaaatccgaaatatcaacaatctgaaatcagatgtgctttacgttggacaagtattgaagctgacaggtaaagcatcttcaggctcttcatcatcgtcgtcttcttcgtcaaatgcaagctccggcacgacgactacatacacggtgaaaagcggtgattccttatgggtgattgctcaaaaatttaatgtaacagctcagcagattcgtgagaaaaacaatttaaaaacggatgtcttgcaggttggccaaaagctggtcatttccggaaaagcttcatcatcgtcttcatccggttcttcaaacaccaccagctcaacgagtgcgaagattaacacaatgatttcggccgctaaagcgcagcttggggttccgtatcgctggggaggcacgacaccgtccgggtttgactgcagcggattcatttactatgtactgaacaaagtcacatccgtatctagattaacggcagcgggatattggaacacaatgaaatcagttagccagcctgctgtcggagatttcgttttcttttcaacatataaagccggcccttcccacgtcggaatttacctaggcaacggggaattcataaatgccaacgattccggagttgtcatttccaatatgaacaactcttactggaaacagcgctatctcggtgcaaaacgatatttctaaaaacagaaactgtgcggccttaacggctgtacagttttttattagagcctaaagacgttgatgctgatcatatgatttgtcaccggatgaaaatagacttcggcccgaacagaaaaagtgtcatctttctgtctgactgtcacccgaaagacatctttagtctgctgatcattcacctctgtacgccccatataagcataatcagaaaatgaagcgcccttatattcatcctgaattttgctccaggcaagctgttcccacttttgaacggactcgtctgtgtccgttgaatgaccttttgcagccattgacacgataatcaatccgcaaaaaagaagtgcgatggtatacggcagggatttcattttttcagtctcctgtacccagaatatattccctcataggtttaccaaaagcgatatcttcattcaggcattttgattttatgtctccctcatattgctacccctttactgacgcagacggcaagttttgccccgtcaataacagaggatgcggcataaactaatcatgaacttctcacccaagaaaggagaagcgattcatggattatgccgattacgataaagcgctttattacacccatcgttctcaatgggataatttattaattttaatggtgcgtacagaggacgatttgttatcaaaacgaattgagcattttctgcatgcgtatcattttgaacaggattacgccgttttagaaaagatgctgtattcccttctccgatatattgatcatgccacagagctgacttatgaagatcaaatagcccttctcacataaacaaatcccggcgtttagacgccgggatttcctgcttttgcgaacatgctgagttcttcgacaagctcttttatgctttccttaatgttttcagccactgtagcattttcaacatcaatatgcaccggatcaagcaccagctgcttcggaatgacattggcgtagacaccccgcatcacagttctcatattgttcagcgcattgatgccgccttttccgcctcccgctactgccaataatgcaacgggcttatatttgaattgttcgctgcttagaaaatccaaggcattttttaaagcgccgctcatgccgctgtgatattcaggcgataataatacaatcgcatccgctttcgtaacgcgttgcttaagctcctgtactttcaacagttcagattgttccgcttcaccgttaaaaacgggcaatacaaactcgcttagatcaatcaaatccgtgtgatacagagctgcaatataggatgctgcaattcttgttctgccatgttttcttggcgtgccatttatgactaacatgttcattttgagatctctccattcaggttatatttcactgcgaaaagcgctgcttgcgtgcgatcggccacttcaagttttgctaaaagattcgatacatgggtttttactgttttttctgaaataaacaaggctgctgcgatttctttattgcttttcccgttcgctatttcagtcagaacgtctttttcccttctagttaattgatagtatttttctttttccgggtcgtgctgatttttcatatgtgtcagcacatggggcataatagctgtagaaagcttgtattcgccaccatgcacttgtcgtgttttcaccaattcctcgggctccgtatcctttaattgatacgccttcgcgcctgcctgaagcgcggggatgacgtgctcctgatcagagtagctcgtcagcacaatgatattcgtatccggaaattgctgtattgcttttttaatggcttgaatgccgtccatctcgggcatagacaaatccattagcacaagatccggctttgtctcttcgatgacacggagggcttctaatccagttgcagcttctccgacgacttcaatatcatcctgggtggcaaagaaaaaacgcagaccctttctgacaacatgatgatcatcagcaatgacaattttcataccgcccctccttttcggctttttagcggaagcctgatggacagctttgttccagttccaagcgctgactcaatccaaaacttagctccggctttttccgctcgctctttcataccttttatgccaagtgaaggcagaccggcatgcgcttcatagcgaaatcctgccccatgatcgatgatatccagctccgcatggcacaaagaagcagtcagactaacatacgccgtatccgttccggcatgctttttgcagttatttaaagcttcctgtacgacacgccatagcatatgctcctgctcatcagtcagaacaggacagcctttttgtgtaaaaatgatcttcaatccaatgagcgcaccatagcttttaatggcttcagccagccctttttccaatcctccggggcgaagctgccaaattaacgctttcatttctgcgagcgcgtcctgtgataggttttggatgaaatcaatcatctgctgtaaattttcatcttttgttagtgtcttcgcagctttggcagttaaactgacggaaaacagcatttgattgactgaatcgtgaagctcctgagcgaggcggttacgctccattaaaagagcatttttttgttgatattcagaaagcctcatacgctggattgccgttccgatctgaaaggcgacagactcgagtaaatgcagctcttcctcatcaaacatggtttttccggccgccgctacatttaacaatccgaatcttctgtccccgtcttctaaaggcacagttgcatgatgcgtaatcccttctgtgtcaaaacaatgcaggttttctgctgattcgatgcgtttgcagttcatgatatttgcagcttttctaagccctccgttattgaatttcgtcaggcagtaacactccccttcgcacatcagcactttttccttgcggcttaaagccgggggcagataagcgtcggccgctaacgtataagacccatcttcttcgatcagaaaaatccatccggattgaaggtttgtcagactcagcaactcttttaaaacctcatccagtgttgctttgatatcgtgcccttgatttaaggtttccgcaatcgttttcagcgtttttaatttttccatcctcgttttgctcacgtttctcactccggcattgatcttgtatttaagattataccagttttttgtatttcattgcttcacttgtaggatgattttctttcagacttttggatgagaaaaagaaaaagccggatcatttacaatgacccagctcatacttgaattattttgctgttgactcaacaatttcatccaccgtcttcattacatcttcagaaaggacggcaagtcgcttttcactgtcttccaaagatgacccttttacggcgaaataaaatttaaccttcggctcagttccagaaggacggagacagaaccaagacccgtcttccaggaagtatttcaatacatttgattttggcaagtcgatggcttcttctttgctttcagtcagaagcgtccgtttgcttacagcgtaatcttctgctgtgacaacctgtttgcccgccattttctgcggcggattttgtctgaaggaagcaagaatcgcttcaatttgctctgctccttgtttgcctttcagcgtcagggatttcagcccttcacgataaaaaccatattcgttaaagagattgatgagcgcctcatacaatgacattccctgttttttatagaacgcgcaaacttcaactgccaaaagcgcagcctgaatggcgtccttatcgcgggcaaaatccccgattaaataaccgtagctctcttcataaccgaattggaaggtatactggcctgatgcttcgtattccttaatcttttcaccgataaacttaaagcctgtcagcgtatcaatcgtatcaaggccgaatgaagaagctacagcacggccgatttcgcttgtgacgatcgttttgagaacaacaccgttatcaggcaggatgccttgttttttcttttcagaaagcaggtaatgaagcagcaacgctccggtttggtttcctgtcagcactgtatatttgccttgatcgtttttcaccgcgatgccgaggcggtcagcatcaggatctgtcgcgatgagaatatctgcattctgctcctccccaagcttaatggcatattcgaatgccgcatgctcttccgggttcggcgatgtaacagtggagaagtttgaatccggcagttcctgttctttgacaaccgttacatttttgtagccgagtgcttcaagaccgcgtctgaccggtttatttgcagttccatgcagcggtgtgaaaacaacctttacatctacttcttccgataattcaggatgtacagaaatggacgtcagtttttctgtataaactttatcaatatcttcaccgatgattttgattaagcctttttcttttaacttattttcttcgtccactgtgatcgtcagctcattttcaatcgcgtttacctgctcaatgacgatgtccgcttcctttggaggcagctggccgccatcatccccgtatactttgtagccgttatattcaggcgggttatggcttgccgttaccacaattccaccataagcgttcagctgtctaacagcgaatgacagctctggcgtcgggcgaagctcatcaaacacgtatgtttggatgccttgtgtcgcaagtgtttttgccgcttccatcgcgaactccggagacttatggcgggaatcataagcaatgacaacgccccgttttttcgcttcctcaccttgcttcgagatgtatgccgcaaacccggccgatgctttgcgcacagtgtaaatattcatccgatttgtcccggcgccgatttccccgcgcattccgccggtaccgaattcaaggtctttatagaaacagtcctcaagggcctgttcatctccctctaattcaataaggcgctcttttaattccagatctaaatgttctgtctgtttccagcgttcatagctctttctccaagtcatattcgtcctcctatgtatcagcttatgccattattttatatgaagcgggtgcctctgtcacttgataacctgagatctccccctttcggcacgtaaaaagaaataacgggctgcagacagcccgttatgatttattgctcaagcggtacgaccgcatcgtgtaaaagcttgttgaggttttctgtatgtttgtttttcgcctgctcatcccattggaatcgctcgctcataaaatcaataacggcatctttatatgttcttacccaattgatatcaaaaaataaacgtcccgttctgcggacaaagaagtcagcaggggttgcagtcatctcttcttctatactgtattctgcctcagcaagaatatgaaccggaatgttgcgtttcgcggcctcatctttcagcgcttctacccggtcaaagacgcgatctacgttagagccgtatctgatcgcaagctgttttgcgtctttttctgataaaccggctgcaattccttcttttgttttcgcggtaacgaaggacataagatttttcgaaccgccgacgtgcccgccagagattggcatgtttttcgttttacatggtccaaaatccttttcgccctcttcttttaagcgatcacggacaagatcaacgatgtgctccgccatttttctgtatccagtcagttttccgccggcaatggtgatcaggcctgagtcagatgtccaaatctcgtctttccgtgaaatttcagaaggatctttgccttcttcatgaatcagcggacgcagccccgcccagctggattcgatgtcattcgcagtgatattcagttccgggaacatgtaattgattgatttgatgacataatcacgatcctccgttgtcatccgcggatgctccagcgcctctttgtaaacagtgtctgttgttcccacgtatgttttgccttcacgaggaatcgcaaataccatccggccatcaggtgtatcgaaatatacagcctgtttcagcggaaagacagactggtcaaatacaaggtgaatgccttttgtatgctgcaaatgctttccgtttttcgaatggtctttttctctgagctgatcgacccaagggcctgtagcattgacaatttttttcgcatacactttatattctttctttgtcagcacatcttcaattaatacgccgacggctttgcctttttcgtaaagaagctccttcactttggagtaattcacaggctctgccccgaatttaaccgcttccttcatgacttcgatggtcagtctcgcatcgtcagtgcggtattccacatagtacccgccgccttttaagccgtcttttttcaccaaaggctctttttgcagcgtttcttttgctgaaagcatgcttcttcgttctgactttttcacacctgcaaggaagtcataaacccttaacccaatagatgttgtaaatgaaccgaatgtgccgcctttatgaaacggaagcagcatccattccggtgtagtgacatgcgggccgttttcatacacaatcgcccgctcttttcctacctcagcgaccattttcacttcaaattgttttaaatagcgcaagccgccatgtaccagcttcgttgatcggcttgatgttcccgccgcaaagtcctgcatttcgcttagtgcgaccttcattccccttgatgccgcgtcaagagctgttccggctcctgtaattcctcctccgataataaataggtcatatgtttttttcgtcatgtctgtcagcatgcgatctctttcaagacttgaaaattgatgattcatcattacgtttcctccttgttgtcacggtaaatagaaaaagagaccacaacagccaaagtgcatgcttacactttggtgctgtggtctctcctcatctcaggaccgttcttattaacttgtaaccattataccatagtattactttatttaaaagccatagctgctttcacggctttttgccagcctttatacagctcatttcgtttttcttcttccaattcaggctcaaaccgtttatccagattccactggttcgcgatttcagaacggtccttccagaatcccacagcgatacccgccaaataagccgcgccaagtgcagtcgtttcattaatttccgggcgctccacaggaacattcaacaggtctccttggaactgcattaggaaattgttttttacagctcctccgtctacacggagcgtctttaatgaaatgtttgaatctgcttccattgcgtcaagcacatctttggtctgataagccaatgactccagtgtcgcacggataaagtgctcttttgttgtccctcttgtcaggccgaaaaccgaaccgcgcacatcgctgtcccagtaaggcgttcccagtccgacaaatgctggaacaacatacacgccgtcagttgaatccactttttctgcataagattcgcttagcgatgaatcctggaacattctcaaaccgtctctaagccactggatggcagagcctgcgacaaaaatgctcccttctaacgcatagttcacttttccgtcaatgccccaagcgattgttgtcaaaagcccatgttcggacttaattgctttttccccggtattcatcagcatgaaacatcctgtgccgtaagtgtttttccccatgccttcttcaaagcatgcctggccgaacaatgcggactgctggtcgcctgccgctccagcaatcgggatattttttccgaagaagtgataatcaacagtctccgcatacacatgagaggacggcttcacttcagggagcatggatttcggtacgcctagaatgtcgagcagttcatcgtcccattttaaatcgtaaatattaaacatcagtgttcttgaggcattggagtaatcggtcacatgcgcttttccgcctgacattttccaaatgagccacgtatcaatcgttccaaacagcagctcgcctttttccgctttttctcttgcgccttccacattgtctaaaatccacttcaccttcgtgccggagaagtaaggatcgattaaaagccctgttttttctctgaatttatcattatatcctttttcacgaagttcctcacaaatgccggacgtctgtctggactgccaaacgattgcattatagacaggacttcctgtatctttatcccacacaaccgtcgtctcgcgctggttcgtgatgccgatgccggcaatttgagaagcgctgattcctgattcagagatgactgaggcgataaccgcgaggacagagccccaaatttcattggcattatgctcaacccagccaggatgcgggaagtattgtgtaaattccttttgagcagagtggacaattttgccttctttattaaacagaatcgctcttgaacttgtcgtcccctgatctaaggataaaatgtacgtttccataagatgtctcccctttgattaaatatatttagaatttgataatgttttagcagaatgtgatttcgtataaacatagagtcctaacaataccacaaccaatataacgcttacaatccagaagctgcttgtgatgtgccctttaaatgcagcgttgtaaaatacaccgccgaatgatccgcctaaaatcgggccgactaccggaacccatgcgtatttccagtttgatgagcccttccccggaatcggaagaaaagcgtgggcgatccgcggacctaagtcacgtgcaggattgatagcatagccggtggtgcctcccagagaaataccgattgctacaatgaggaaaccgacgattaaaggattaagtccttctgtaaattgatttgcacctatggccaagattccaagtacaaggacaaatgtcccaatcacttcgcttaaaacgtttgcaaatgtatgcggaatgctgggccctgttgagaaaacacccagcttggcagcgggatcatccgttgacttccagtgcgggaggtaatgcagataaataatcaccgcaccgatgatcgctccgatcatttgcgccgcaatataaaccggaacctctttccaaggaaaatctcctacaaatgcaagcgctatcgttagcgccggattcaaatgggcaccgctgatgccgccaaccgcgtatgccgccatggcaacacccaatccccatccaaatacaacaacaatccagccagactggaatgaaagcgatttctttaaattgacacctgcacaaacacctgcaccaaaaatgataagcagcatcgtaccgatgacttctccccaaaatgctgtcatagcacattcctcctaaagtcacgattaaaaagcatgatagagaagaagagaataaaaaaaccacaacaaaccgctttacgggtgcataaacatttgccgtaaagagctgctgtggtctccgagttctccatcacaatgtattaacctagtgcaattgtatcagtgcatgaaagcggtgtcaatcactttccgtcaaaaagttttcatattttttccacaatttggtattagatgttgtgacagctacagcccccgctttcaatgcctgctctacatcctcttccgtacggatgaaacccccggcaaagatgggaatccctgttttctcttttatttcctgaatgagtgacggaacgatgccgggaagcacttcgatgaagtcaggcttatgcttgccgataaactccatgcttttctccatcgcgcttgtatcaagcaaaaacaggcgctgaatggcataaattttcttctgcttcgctttggcaatcacattcgatcttgtggaaataatcccagcgggcttgatatcctgacatataaattccgcaccgtattcgtcatgcttaatcccttgaatgagatcgacgtgcaccatcatgttctttccgtgcttttgcgcttctttgatcacgcccttcagctggccgagatgaatatcaagaataacaccgtaagagaatgaactgttcaaaaactcatcaaattgcttcatattgcgaatagccggtaagatcggctggttgtgaaaactcatcatgtgctcctttaataattcacttttatattatatcgtttgaaagctttctttcaccgttttcacgataaaggaaaggtcctcttctgtcaggcaaaatggcggcgcaagctggatgacattgttgtagccggcgactgtatcgccgtttttgccgatgatcagccctttttctttgcacgccgcaaccacttggtttactttggcggcatcagccggctctttagtcaatttgtctttgacgagttcgattccgatcagcagcccttttcctctaacatccccgactgccgggtgttctctcagagcttgaagctcacctaaaagctttgctccaagatcacgggatcgctgaatcagctgttcgtcctccataatttgcaggtttttcaacgccaaagcacaggcagccgggcttccgccgaacgtgttcacgtggcggaaacggtcataaggagcttccccctgatacgcttcgaaaatgtcccgtttcacagcagtcgctgacaatggcagatacgcgcttgtgattccctttgccatcgtaatgatatcaggcttcacaccgtagtgcataaacccgaacggctcacctgtccgtccaaacccgcagatcacttcatcgcaaatcaaaagggctccgtggcgccggcaaatgtcctccaccttcttcatatatccgtccggcggcattaggatgcctccgcctgtaatgatgggctccataatgaccccggcaatcgtttcgcttaattcccatgtcatgatgcggtcgatttcatttgcgctttcaagcgtgtctgcatcatcaggattccggtatatatctggcggagctgcatgcaggaacccttggctcaaaggctcgtatttatatttccgctgcgcctgtccggtagctgagagcgctcccaatgtattgccgtggtatgcccgatatcttgagatgaatttataacggctgtggtcgccgttttgcagatggtactggcgggcaattttaaaagcagtttcgtttgcttccgatccgctgttggaaaaaaaaataacataatcgccgccaagccattcattcagcttttccgccagttgaattgcgggtgcgtgactttgcgttaacgggtagtaaggcagctcctttagttgctcataggcagcctccgcaagctcctttctgccgtaaccaatgttgacgcaccacaaaccggacatcgcatccaaatagcggcgtccgtctgtgtcggttacccaggccccttcggccttctgggctatcaggctgtccgcttgatgcgctcccttcatggcatgccacacaaattgctcatctttttgctttaatccctgattttgctgaatgttttccatccccatcatctccatttcattagcgttccctataatgccaattcaattgaaacagaccttctctttatgtgatgtcttggtgatgatttccctgccttcaatataaagccagaccgggtcagagtcaataaaccgcgtaaataataaaacatcccctttctcaagaagaaagaggatgcagcttccaaagcaaaacaggcaaagtgacaatgctcagcatcgtactgataaaggtcgcactcgaaacaacttggacagccattgcaatagcaatgtgaagcctagccgttttctgtatgatataggaaatggcgaaaatacagaaactccataaggcacatccactatacaatttacttttattttaaagaaagcacctaaacaattccgcttttgtttaaaaaaacccgccaattcaggcgggttttttgggaattattttttatattgaatatgataaatatcacgtcgtctgtcttttagctggcgcactgtaccgttttggcgctgtcttctgagaatttccaggtcaacatcgccgatgacgaccatttcaatattcgggtttgtttcgccgacaatgccgtctcgggcgaattcaaaatcagacggggcaaagatgcctgactgggcgtattggatatccatgttttccgtttgcggaaggtttccgaccgttccagagataaccgtataaatttgattttcaaccgctctagcctgcgaacagtatctgacacgcagatagccttgacggtcttctgtacaaaatggcgtaaagatgattttggctcctttatcagccgcaatccgggcaagctcaggaaattcaatgtcataacagatctggatcgcgattttcccgcagtccgtatcaaacacgcgaacttggtctcctgcgctgatcccccaccatttgcgttcattcggcgtaatatggagtttgtattgcttctcgatcgttccgtcccgtctgaacaggtaagcgatattatagatcttgccttcctcttcgacgaaatgagatccgccgataatgttgacgttatacttcacagccaagtcagtaaacaggctgatgtaatcttctgtatactcggtaattctctgcaccgccaagctcggtgaccgttcctcaaggaaggacatcagctgggttgtgaaaatttccgggaacaccgcaaaatcagatcttgcgtcggaagcaacatcgacatagtattctacttgattcgcaaattcctcaaaggaataaattttcttcatttcgtattggatcacacaaattctaacagggaacgccgatttataatagcgttttgtctgctgcggtagataatcgacattattccattccatcagcgtcgcatacttgatcgaagctgtatcatccgggagatagttcgggttaattcgcataagggtaaagccgttcatcagctgaaaagaaagaaccggatcgtaaatttggtggcgtgtcacctgttcaacatactctctcgctgtcatttcctctgcatatttgtgatagtttggaatccgtccgcctatgatgatgcttttcaggtttaagcgtctggctaagtcctttctcgcctcgtacaaacggtggccgatcttcattcgtctgtatttcgggtgcaccatgacttcaattccgtacatattcaagccgtcaggattatggttggtgatataaccgtcatctgtaatgtcctgccacgtatggcggtcatcatattcatcaaagttaatcaggagacttgagcacgaaccgataatttcaccttcgaattctgcacaaaactgtccttccggaaaatgctccaaatggctgattaaatgctcccgcttccaaggctccattcctggaaagcagtccttttgaagatcgataatcttgtcgatgtctttctcttcgatattgcggataaccattttcttttcaaaccgggtcaaatctaatttctcagacaacctactcgctcctttctagttttgtgagttcagatgatcaagcaatagggcgagctccatctccgccattgattcaagcctgtgatcatagtcttcaaacatcaaggtacccgttactttattcgggacaatgacacacttcatgcctgcacgtttcgcagcaatcgaaccattgacagaatcctcaaacgcgagacattccgctggcgatacccccaggttctttgccgccaataaatagagttcaggattcggcttcacctcttccacatcatccgccgtttgaataacttcaaaatcatcaaacaggccgatttgcttcaaatggccggacacccatttataatcagagctggaggcaaggcctatttttaagcctaaatcctttgccgcattcaaatacgcttcgacaccaggtctcgctttttctgattccatgcgtttggcaaaccgctctcttctcaattgtgtgagctcttcatggttcagctttttcccgatctgctcttctaaatattcaaaaggccggaaacccgcagcagttccgatgacctttccccagacagatagcggcagcactgagccgtgctcttcaaatatttcctgaagaacctcatattcgtgtgtttctgtatctagaataagcccgtcaaaatcaaaaattaacgctttaatcactgggtacaactcctttagtacgaattgagacatatgtatacactcactataccccgaaacaagtctgctttcaaaaagtaaggttttatgtgaagaaagagcctgcacactgcaagctctttcttattaatgaatgttttggtgagaaatgtttgtcagcgctgatcccgcagactcgttcgacatctgattgactgccaggtctccaagcgcaacgatcccgactagattgttttgatctacaataggaaggcggcggatttggtgctgggccatcagctgcgacgcgtcttccagactcatattagggtttcctgatacgagttctgttgacatcacttctgaaacgggtgtctggccatcacggccctgagctgtagttcttaatgcaatgtcacggtcagtcagcattccttttaaaacaccttgctctacaacggggatcgccccgacgttatgctgtttcattagagaagccgcttcctgaatcgtttgattcggagaaacggttgccacctgcgttgtcattgtatctttaactgaactcattgtcagcacccctttcaatcattagtatgttcagacacgagccgtttaaaaagggagttagaggaaaggttttatgatatgatttctctgatacaaaaagagcttttctaaaaatagaaaagcccttgccgcatgattatatcagccttctttgaccgaaaaaggctttgttagtcttcttttgaaagtcagaaaaagcaaacggaaaataaatcccaaaatcattcagcatcttgctgtttttttcaaaaatcgcctgatcactcaaatcagagtgcggcgaaggcttggtcaggataatatgtatcatttgcagacaagccataatttgaaatgcttcttttaatgttccttggtaataatggttatttaaagacagaacgcctttctttttaaagcgctgaatgtccagttcggagaaataaagaggaaatacatcatggatcagctccatagacagctccttgataaagctctcctgttctgcagttgctgcgttcacaattctcacgtcaatcacctttcttgccatcgaatatcctaagtcttactcaagaatagcacagaaaaaaacgcgaaagctaaggtaagtgtttcctatgagaaacagcagccttccgcttcgaaaaggagccatttaacatgaaccaaaaaggcagagggcttgagatcctcatcaatgaaaaacaggacggccaatggctgttttccgtactcaaaacagcgctcaaagcttctaaaccagtgatacaagactggatgtcccatcaacagataaaggtcaatcacgaatccgtcttaaacaatatgattgtaaaaaagggagaccgcgtgttcattgatcttcaggaaagtgaagcatcttcggtcattccggagtatggcgagcttgatattttatttgaggacaatcatatgctcatcatcaataaacccgctggcatcgcgacgcatccgaatgaggatgggcaaaccggcacactggctaatttgatcgcgtatcattatcagataaatggcgaaacatgtaaggtgcgccacgtccatcgtcttgatcaggatacatctggcgctatcgtttttgccaagcatcgtttggcacacgccatcttagaccagcagttagagaaaaagacgctgaagcgtacgtataccgctatcgctgaaggtaagctacggacgaaaaaagggacaattaattcaccgatcggcagagaccgctcacacccgacaagacgccgggtttcaccaggcgggcaaacagccgtcactcatttcaaggtaatggccagcaatgcgaaagaacggctgtcgctcgttgaattagagctggaaacaggcagaacacaccaaatccgtgttcatctggcgagcctcggccatccgttgacaggagactcgctttacggaggcgggagcaagctgctaaacaggcaggcactgcacgccaataaagtacaagcggttcacccgataacagacgagctcatagttgctgaagcccctttccctgctgatatgaaaaacctttgccgcacatatttttcatgaagaaaagccgcaggcactgcctcggctttttaagtcactcgttttccatatataatatagcgcttcggggcatttccgacgtatgaaaacggatagcaggtcgtcagaatcagctcttccttttcatgctggagcgtgataatagatgtgtcatccttatcgacaatttttgtttttacaatttcatatgtgaattctccatatgacaggagaagacggagctgatcccccttttccagctctcccgtccggcgaaacacggtatcccgatgccctgacagcacaatttgtccgttttcatcaggataatagctgtccttgtaatgcccgacacctttttctaaatcatcagcatcggtgccctccacgatcggaagctctgcattgattttcggtatttctaaaatgccgctcgcttggccggtctcaggcttaaatgatgctttgttctttgcttgatctgtgctatttttcgtccccgaagcttcctgcggctttttagccgccagctttgcttcttttaatgtctgttccgttttcgtattcgtatcgatcaatttaaagcctccatagcctgcgatcactaggccggcagcaatgatgaatagtggaataacttttttcacgttctggaggcgctcctttttcttctgacatatagataagttcctgacaatgtcaccgccgcaccgattaccataaagttatagtagcccgctgacgtatccggaagctgatgatcagacccgctttccgcagtctcggtttgtaacggcaatgtgctgatgctattagcagtatcagcggtttttgtgttgttgattggtatttcattgaatctcgaaatggctgaaggcggaagctgatgaaccggtgctgttcccggagtttcttttatatcaggcaaatcttcacctggccttggatcctctttaatcggatcctccgtccccggatcatctccaggctcttccgttatcgggtcttctgttacagggtcttcaatatcactggcttcagcaagcttaattcttccctcttttgtatacgcaattggctcatcaaaactcttcacgtactcaactgtcgcttccaaatcctcaggccctgtcaccggattttttcccagcagtccgattggctgatatttggctcctgtcgccgtcgccataaagttgttgacggtcaatgtatatgtggcatcgggctggatctcggtgccatctgccattttcatatcaactgcttttccggtttctttatcccacgtatacgtaaacccgctgatgctgtagtcaggcccaaaaaccggcgagatttgcgcattgataatctctcttaaatcttttcctttaatctcaagcttcgttaacacatttccaaacggctgaatattgtaaagatctccccacgtaattggacccttcttcagcgcttcacgtatgccgccgccattcataagggcaaaatccgttttcatggcagctctcataccatccgcaatcaggtttccaagaggtgtatcgccgtcatttgaataccccccttccatatcaacagcggcttcgccgactacctcgctgataatcggttccgcaattgtttcgtatttctttaaaatggctgacgcgctgacatccggttcgattttactttgatcaacatatacgatttccgcggactttttgacaatgtcttttgtcgttttatcgatctctacatcaacgacacctatcgcttttccatattcaaacgcttgaacaatcagttttccattcacttcaccgttaacaacctgatgattatgcgcggcaaaaatcacgtcaatttcagaatctgttttgtttgcaagatcagcagactcaccggtaatggcgttgccgttttgttcagctgacatatgtgcgagaaccgcgatggccttcacgccttttttcttgagctcttcggccgccttattcaccgctgttgcttcatctgtaaactcgatattttttattccttcaggcataaccatgccagctgccgactgtgtgacaactccgataaaagcaacgggtacgccctccacattaatgatgtcgtaagccggcaaaaagggctctccagttgatttcattttacaattggcacatacaaggggaaagttctgtccatcatatccgcttgtgcctttcggatgatcaccgccatttaagatcctcagaagttcatccgtgccttcatcaaattcgtggtttcccacggttccgacatcaaatccgatgtcctccatcagttctacagtcggttcatcctgaagaagagaggaaactggagagcttccgccgatcatatctcccgcgtgcacaatcagcgagtttttcttttcagcctttttttcttttaaatatgcggcggcataatccatgcgtccaaacgtgccgtctacagttccatttccatcaagatcaagctcatattgctgatcgattttgccatgcaaatcattcatgctgagaattctaagcggcacatgttcttgaggtgccgtttgcctttttttatatcccgcgctctccgcttcacttgctgaggcgaagaaaattctgttttccacagctatcttcttccagtcagctggctgcacatatgttttattcgacgagtcccccacatatcttgtcaggcctttcccttgctctctggctctgaattcaaacggcatttccatgaggggatcgttttcattccaaattcctttttgatctttttttgcagcggctactgcggcctgaaattgctgataatcctcttcattgtcaaccggccaaataaaatacgtcggagcatagccgttttttacaagctctaagttcacgtttgaacctgattcggttatgacttgtccgagcaatctgccatagctgtccttggcttcactcccgaccttgacagtaattttatcacccggggacagaaccgtttttagatagtcagatgcttttttgccaaatcttaattgattttcatctgcgtcattttttggtgtgtgatatgtttcgggtgcatctacatttacaaaccggatttttgtcgttccaagcaccggagatttaagatgaatggtatcgccgtcaactacccggtcaacaatcccttcatattctccctctgcagacggaggtgcgggctgctcttcaagcagcttcaggtcagccgattttcgcggaagcagctgaaaggtttggtatctgcttaacacaccggtaaattcataccatttgccctcatcaagctcgtttatcacccctgtttcattcataacccggagcgtcattgcatgatggtcgtcatcaatcattgttacattgtaaccgccgccggcaggagaacttggaattgaggaaacaaaagcggttagtttcacaaggcgtccttcatactgatcacctaggctgccgttaataagttcattgattgttaagtgtttgggggcggggagggattgatttgactggttgattttgatgcctgatgagtttggaacgatttctttcagcccctggtaagacgtgattttccctgtcaccgtgacatccataccctcttttaattcgggaaattgttcaggggatggcgaataaatgttaatgcctccggtttcatcttgcaaaaaggtcgacagcttcccgcctccgattgcgttttgatcagctgtaatgatcccttttatcgttacttcttcattcagccttccccgtgcttcatttatggtcacttgctgttcagccggcggagtttttgtgtcatcggttacgttcatcgactgaacgtttttaagtcctgtcgtgttaaagtaattttcaagctttccttgaaccgttatctttttcccaagaagaagcggattggtttgcagcccaaattggcttctgaaggcggaggggatttgcacaggaaggatgtgttcgggcgatgttttgtttttacggtctgccagcgcaacattataatcatttgaaaaagggcttgtcagtttataatgctgcggggaaacagcctggccgactgcatatccttcgacaagtgcctgtccttctttttgctgtattgccttctcaatcgatataggctgttgcggttcagctgcctttacagcttcgaacgtgtacattacatttaagaacattaatgccgtgatcaacacaatatgcagaatacgcctcatcatatttcctcccttatacacataatgacaacgattttgtctgcttatcatttcgacagacagcatataattcctttcaggcttctgcataatacacggcagactgacacaaaatacagctgatctgaaaaaaaaggaggaattcggtttggatcagttcaatcagcagcagcaatcccaaatgaacaaaggtattcctggcaaaccgcataaaaaccacggcggacatgaaatgtttgatatgcatgaggtgctttccggaacacttactgtgcttgatcagtttatgatgctgagacaattctgtaaggatcaagaattactaaacatccttgatcgtcaacatcaattcatcacatctcaatacaatataactgcagaatgcttcaaaacaggaagcgaaccttcacaaaaaacagcaacttatatgatgaaggaagacaaccagactgtttacggcatgcagccgtcacagcctaaaaaacctgttcaatccatgaatgatattgatgacagcatcatcagccgacaaatgctttgcgcgattaaagcacaagcttctatgctgacgatggcttctctggaaatgacaaatccggccgtaagacgcgtactgtctgcgcaaattcaggagtatgttgaaatggcatttgaaattttcctataccaaaacaaacacggctattaccaggttcctcagcttgatgcgcaggatatggaacagctgcgaaattcattcgcccctgcccaaggacaaatgcctccgacacaaggcggaatgggtcagcaaggacttcactaataacaaaggcattggatagatactatccaatgccgcactgtttttttcaaattttttcttaaaatctttttcaaattgatcaagactttcctttgttgctgatttaaaccctttttcaaagtcccctttttttgccgtttccttaatcatttctgaaataatgtctttcccgtatttgtccgtcagctcatcgatcatataaaagctttgcaaatagacatcagtgtcatattcggctctagcttcctgccagtctcgatcagtctgcaaacggtcaaagggcacgacagaaaacgtgatcggatctatgagcaattcatagttcgcaatccactcgcttaacccttcatgaaaccataacggaaactcatcgggatccgtctcaagctccttcaatttctggtgaaacgcatggtgcgagtattcatgaatcaacaatctctggtacaaataaaccgctacctcgtccccttctaacagtttctttttctcttcaggcaacaatccgatcagctgctcccgttcagaataaaaaccaactacatccaataaaccggagtaagcctccatctgtttttcattaggaaaaaaaataatgtcaataggcttttgattcgaatatccaatcataatctgattaatactgaccgcatattcaagcgtttctttcgtcaatggcagtaaggacttttccttagaagtgtaataaatatcggcctgtttgaatgactctttcttcatgtgcttcgtcacttgttcttttgttattccagatgcctgacctggaaaagacaggatatacatcgcgcttgatacgatggctgagcttacagccagcatcacaaggactccgcacaggaatagagcggatgccgcacgctttcctatgccatcccgcaaacgtctccctccctgagccggtccgtcttgtacctttttatttttactctatgcagcctgagttcgcagtgtgtcattaacgcaaagaaaaagccgcacaaattgtgcggcttctttcatttattcagcgttagggaatacacgctgtacagtttgtgtaaattcatcaaataatccggcgattgggtcaccattttgaatacgctttccatatccttgcatacgctctacaaaatcagggttagctgaaacgtaaacattatcaatgtttttgtcagtagatcttacctttttggctatttttttcttcagattgttttctactgcacctttatttccattggttaaaacgactgcaacgtaggcttgatttccagccacaatgatatcggcatgctttacttcttttaggtctgttactttatcagctgcttcatcagcaacctcaagttttcggtcgttgttattatcgtcatttacacgattgttattgacattatcattaacattgttgtcaacgttatcccgattgtttacattccgcatatcgtcattggccggatttcgataatttacgtttcttacatcattattatcacgtctgccctcaccttggtcggctacaccgcagccagtcataagcaaagggataagaagcacagacgcaaggacttgtttttttccaaacatgtgaattcctcctttatcactttacttataggtttttctaactggctttaattatgcatgcaaatctggaggaaatgctttcccgggaaatataacggttaatttgtctaacgagggggaaaatatgaatacactgcaaaggagggatcatgttgttcaaccagcgaagaggaatcagccccgcagcattgatcataggatcaactatgcttattactgcattatcacctcagatccgccaaagaatcagcgggtttatcacaggacaaatgaacagacgaaattcagaaaataacacgtttgatgcttctaatgtaggaaacatggtcaaacaagcatttagcggaagcagcggaagcagcggtgataaccaggaccgttcgcagcatcaaagccagcggcaaaatggccgtcagcaccagcacgctggacagcagcaaccacagcatcagcatacacagtctcaaactaggcaaactgagacagccgcgaaaaaaagacagccgcattatgctgaacccattcattttgaacaaaacgcaatgaatgtcatggacgacaacacgatgatggaaatgctggaggacttagagcctggccgttaaaaaaacgtgtaatcctcttggattacacgttttcatatgttacgcttcttcagcttcaatcactctggattgatcatgaaatgccccttgatcaatttcttttgtgaccttacttgtaataagaccggatgtcatgcttccgctgacattcaaagcagtacgccccatgtcgattaacggttcaattgagattaacaaaccggcgagcgcgacaggcatgtttaatgatgataaaacaagaagcgccgcgaatgtcgctccgccgccgactccggcaaccccgaaggagctgatggcaacgactgcgataacagtgataataaacaccgggtcaaatggattttggccgacagtcggagcaatcatcatcgccagcatcgcaggataaatgccggcacatccattttggccgatcgaaagaccgaacgaaccggcaaagtttgcgattccctccggtacacccatgcttctctgtgttttaatattcagcggtaaagcacctgcgctagaccttgacgtaaatgcaaatacaagtacaggcaccgcttttttcaaataaatcaccggattcaagccgctgaacgtcagcagcagcaaatgaatgataaacatagtgattaacgcggcatatgatgcaatcacgaacatgcccagttttagaatgctgtcaagatcactcgttgcaattgtttttgtcatgatggccagcaccccataaggcgtcagtctcaaaatgagtgtgacaacacgcatgacaatggcataaacggcatcaaccagttttttaaatgtttctgcctgttccggctgtttgtgttttacgccgaggaatgccactccaaggaaagcggcaaaaataacgacagcgatcgttgaagtcggtctagctcccgtaaaatctaaaaacgggtttccaggcagcagttcaacaatctgctgcggcagcgttttcgctgtcatatcctctgatttctgctgaagctcctgtccccgtgaaagctctgtacttccttggtcaacctgaatcgcctgcagatcaaatgaaagcgcggacgcgataccgacagctgcagcaactgctgttgttgctactaaaatcccgataatcaaaccgctgattttcccaagattttttgtcagcttcagctttgtaaaggcgccgagaatcgaaataaagacgagcggcatgacaaccatctgaagcaatttgacatatccgcccccggcaatattaaaccagtcggctgtttgaatgactatatttgaagtcgggccgtaaatcagctgaagcgcaaatccgaatacaatccccagccccagcgcagtaaatacacgtttagagaaggaaacatgttttttctgcataacaaagagccctaagataagtaaaaataaaataaatacatgtaatacaaccagtaaagtctccaaagcaggtaaactctcccttcaaattttctcatttactatattacactaattccgatgggtcaagtgcgaattattttaacttatcaattcaagtaaaaaaaccttatataatgccttttttgttcttttctttcccttccatctttagtaccttatataagggtgataatatttgctgaaagaactgtttgtaaatttgaccattttaatcacatttaattatctcttcacccacctgtttaaagaaaggctagtacataaaaaagacagcatatcctttcaagctgttaaaggactggcctgcggtttgctcggggttattctgatggtttttggatttacctatcagcattcaattattgatcttcgaaatatccctattatgattgccgctctttatggaggctgggtttcaacggcaacggccctggccatgatcactgcaggccgcttgctgattacgatgaacacatctgcactatactcggttattatcatttgtatcgctgccattccgtcactcattgtttctagaagaaaaaaagttcaactaaaacatgctttctatcttttaataatcacaaatagcttgatctccttttccttttattttcttatagatttacattcatacgaacttcatttgtatttttggatcatatcaatagcgggcggcatgctcagtttatatattattgatcatgaaacaaatgcacatcttctttttaaacaatataagtttcaggcgcactttgactttttaacaggcgtgtataaccgaagaaaatttgaagaaaccacaaaagctctgtatcagcaggcggccgataccccgcattttcaatttgcactgatttatatggatatcgatcattttaagaccatcaatgaccaatatggccatcatgaaggagatcaggtgctcaaagagctagggttacgtctgaagcagaccatccgaaatactgatcctgccgctcggatcggcggtgaagaatttgccgtgctcctgccgaactgttctcttgataaagcagcccggatcgctgaacggatcaggagcactgtaagtgatgcaccgattgtattaacaaacggcgacgagctttcagttacgatatcactaggggccgctcattaccccaataatacggaacagccaggatccttgcccattcttgccgatcaaatgctttacaaagcgaaagaaacgggacggaacagagtgtgtttttcagaaaaaaaagaatgaattcaatgttcgaattcattcttccaatctgaaagacgtttcaaaggcagaaaagccgggacaagatctccctgatattctttttctataaatgccgctgtatcatcagcttgataaagctcaagaatggtttgcagcgcttcccgatcttgatcctccgctctgacaacaatcaaattcatctcttcctcagacatgagtccgccgctctttagcgtatgctttttcgggttcaagcccgctttttttgcttctgatggtttcatgacaaacacgtcggcaccgctcactgcatcctgttgccggacagcttttaatttcaggtgtctcggattatctttaatcatatcaactgaacctgttccgttaaatccgtttttcagcgttagcaaacccgcttcctggagcaccgtaagcgccctgccaaaatcgaacgctttatccggaacagaaacgacagctccccgcgatatatctcggattcgttcatatcgttttgaataaatgcccatgggcgttatgtatgtcgtcccgagcggtgccaaattaagtttgtatttttcagtgaacgactgaaaatatgaaatggtttgaaaggcgttggcatcaatttctttgttagcaagtgcgatatcagactccgcataatcagaaaaagggatcagctgaatatccagccctgcctcttcagccttttgagcaatatagttccatattgccccgtcagactcagcaatcccgatttttatcgattcatgttctgcagacggtgaacatgcagtaaatgaaacgagaagaacaaggacgaaactgcatataagccactttttcattgtgaccatactcctatctatgtattagagcatgcaagcaatatcagacataaaaatcatacgctctcttagttgataaacgttgtcatttgtaatattgattaacttttaccttactcatatccaataaggttgtcaattcctattacttatcttcccaaaatgaaggaatactaaggcaaacgtatgatcacatatcgagaaaacagatgaatttccgtaaataaatatcaaattgaaaaataaatatggtattttccgaaaaaaatttcaataagcagttgttttttctgaagattactggtagagtaaaggtaattatttttgttcgaactatctttaagaagaaagttttgtaagagttttcgtcttgaaagtttgttaagagcaagaatagtgaatttaagcgttatgatcgctttaggaggaaatttcatgttagaaggtaaagtaaaatggttcaactctgaaaaaggtttcggattcatcgaagtagaaggtcaagacgatgtattcgttcatttctctgctattcaaggcgaaggcttcaaaactttagaagaaggccaagctgtttcttttgaaatcgttgaaggaaaccgcggaccacaagctgctaacgttactaaagaagcgtaagcataaattgatatgaaaaactgcaggtgcaaacctgcagtttttattttgacaaaaaagctgttttgcataagcaaaacagctttttttattagtttgcaatatcccgcttcatgaagattccgaaagcaagcaacaggaagatgataaagtagatcgccagcatgacgagagaaaacgtcatagtcatcccttttattaacggtgtgccatccacatactgagtcaagtcgacattagcaaacaatatatactttgcccagtcaaatttcgctgcaataaatgcagttgcagtcgtaccggcaaccaacaagaagatggaaaaaccaaccgcaagagagctgtttctgaataccgcagacagcataaacgccatcgtcgccaccattaaagccgagacggattcagaaagatacgttgtagccaaatgccccatcatgttttgctcaatgacatggccatccttatagattaaatgaatattcgcggcggtttcaccacccgttccgaagaagatcaaccctaataaagtagaaccgataaataaaatcaacagcaacaggagcccaaacaggagaactgtaatatatttggacatcaaaatttgaaaacgactgagcggccgaatcattaatagcttaatcgttccccaattaaattcgttcgcgacaattccggccgcgatgataatagtaaacagaccggtaaggatggtaaagtttgctgaatccgttacataagaccataccgtatagcccgtgtcactagggatattatgctcgatgcgatagtcattgagtgtgattgtttctttatacccatctttcagtgaaggatcttctttgatttctttctttaattcggcgttttgtgcttgaagctcttgtttccaatgggaatttgattcaccggcagaaaaatgattcgccaaaaatgcaaatccaaccattgtcagccccagaattccgatcatcacccatgttccggcacggctgaaaattttgagccactcattataaatcaaattaagcatgctgaacctcctcttttgtttcacctgtcatttctaagaaacggtcctctaatgattttgttatgaccttgacctcataaatacggatttgctgcatcaccagcaattcaataaccgcagggacttcctctttagccagtttgatttctacaccatttgtcttactcagcaaatcgtactgatttaaaacagtagcggcttcactcggctgctcaacctggaagaaatatgtatcattctcatcaatgttttcatcttttacattttgaatatcgatcagctttcctttttgcagaatcgcaattcgatcacacatcagttccatttctgacagcaggtggcttgaaacgatgacagccattcctctttctcgggtcagcttctttaaatgatctctgatttctctgatccccgccggatcaaggccgtttgtcggttcatccaaaatcagcactttcggatcgtgcagaaggcattgtgccaagccaagacgctgtctcatccccagagaatatgttttcaccttgtcgtggattctgtctgttaaaccgaccagttcaacaacttcatcaattttttccttcgtgacacccttgaccatccttgcgaattgctggagatttttatatccgctcaaaaatttatacagctcgggattctcaacgatcgctccgatatgcttaatcgccttggcatattctttcgtaattgattggccgcaaatgaggacatcacctttcgacagcttcattaaccccaccatcatccggatggttgtcgttttccccgctccgtttggtcctaaaaaaccgaatacctcgccttcacgaatcgtaaaactgagatcatcaatgatcgttcggcctctgatgtttttagtcacgtttttcaattccaacactgttttcatcatattcctcctctttctagcaaacttccatttttgatttaaaccattgcaaaacagacatgccttcctgttcacgaatatcttctacttcacgctgcgcaactttttctccattggcgaggatgattacttcatctaacaaagtctcaatttcatcaatttcatgtgtcgcgatcacgacaatctgctgctcaaaatcaatgtacgacacaaggctgtttacgatggaatccctgaccatcggatcaagcccggaaaaaggttcatcaagcaagatgacgtctgcccgtctcgctaaagcaagaacgattttcagcctgccccgatttccttttgatagctttttgatctttttttccggattcagctgcatctcattcaatagcttataaacctgttctgtatgaaaatcaggaaactgcgactgataaaaattcaccatatctttaacagtgaaatgcggataaaacatatcaagctcagtaagataagccgtttgacgcaccatttctctcgtaacctgctcttcatcaacttttacaaatcctgaagtcggaaacagaaggccagccatcattttcagggtcgttgacttgccgctgccgttcggtccaatcaggccataaatccgtccggatgatagggtgattgacacatcattgacggccgtatggcggccgtatttttttgatacatgttctagcttgatttccattttagcctccctctgtgaatgttttaatcccttctaacatttcttctttcgttagccccagctctttcatttgcttgacaaagccttccagcacctctcgtgtcagcttgtctttcagctcgtctacgatttctgctttttccgcaataaacgtcccttgacctcttcttgtctccacaatacccagcctttccatctcactgtaagttctttgaattgtattgggatttactttagtttgaatcgccatttctcttactgaaggaagcttgtctcctgggagcagctccttcctgaccagcctataaaagatctgatcagcgatctgcagataaatcggtttcgaggattggaattgattgtccatatttacacctctactttacgatcaagcagttttgaagccatgatgagcagcaagaatgtgatgactatagcaataggaaaccctagcacagacagatggataggttttagttccaatctccaaacattgtggaagtggaaatcaaaattgcaatagactgttacaggccagaaatgcttttgagattcaaccaaagggcttatgatgtattcatcgaagaataaccacattgcgaccaacagaaccatcgcagcccaccgcattccgcgccaatttctgagagagtgaaaaacagtccaaaacacaatgactgttactgacatatctaacgaagaaataagcccatacatattcagcaaagccactgtactcgttatatcaacttgatgctccagcagattttttacagagagcatatgatacatccatatgccataggctgttaatgccaactgaatcacaaattgatagagcaaagatgctgccaatttagaagaaaacagccataagccgccatttggattgtacagccaaagctgtgatttcccttccttgcgaaggtgataaaaaacaaaaacaggagataagaaaagcagaaaaaaagcaactgcaacaaaaaaaccaaaaatgactagaggttctttcgtgcgagaagctataatatggcctgttcccaataagaaaatgattccgcatatccatactagcagccacattcttgaaagcttgatatctttctttaataaacctaaaaaagaattcatgtctttacctcccggaaaaaatcctcggtgtatgagtaacatagtacactagatcaaggtggaatacaacatattccatggatttatttgataaaaacataattgatggaaacagcaaaaaaggcaaacccgcatgagtaaacggatttgcctttttcattactttttcttatttttcatagagagcagcgcatcacgatagctgcggtcctgcattttgtcactttcctcagtgacctcttcttctgcatgaacttcatcagaatgcttaaacttttgcagcgcctgcctgtaaatatcatcacccattgtgtcacgcttctcttttggagaatcgtttttgacaacggatggcgtatgctcggcagcccttgcttcagcagggtaatgcgcttcgtttttttcctcttctggaggtgcgattctatcggttgcttcttgcttctcaggtccaggtgaggcgttgcggacgttaaatgtaataagggccgcaatgacaatgacagcagcaattattgctataataatggccatttcaacctctccttactgtcctgctgttaggtttcctgtgacttggctgacacgtcttcccaacgcgcgtccaagctgaataccttcctcagacattaactcatcactgtctaccggacaagtgacacctgctccgtaataagagccataaagtgcgttttcaggcacgttgccaggcagtccgacaacaatcatgccttggtggaacatcggcgtgattaaattgtgcattgtcatttccaagccgccgtgtgttgttgccgttgtgcagaagacagcaccgactttgttgatcagctcgccttcagcccacaagtagccaagtctgtcgatccaagttttaagaccggagctgattgttccgaaatgccctgggcatccccaaataatcgcatccatatctttaagcttgcggatatcagcctgatctacatggtcgatgaacacttcagccgcgtcgttttctctcgcgccttcagcaatcgcttctgcaagcactttagtatgttcgccttcactatcatacactacataaattttcattcaggaaacctccctgtacagattaagattccttagcttcttttggagcaggaagtaatgaaagctcctcttttttcttcttacgcaatttatcttttctgacgtcacgcaggaagatacttaaaatcaaacctgctacacagaataaggttgcccacataaaggcatcatttatccccatgacattggaatcgagtgatgcgtgtttataaatatgtgagtacacatatgttttcgccgtatcataagacacattcatattcaccattaaattcgaaactgcattttggaacgcatggaggaagttcgggtccgccgtgcttgttttatctgcaatttgtgaataatggaatgtcgtccggtttgtataaatcgtcgtaattaaacttgttccgattgatccgctgatttggcgaagcgtgttactcatcgccgttccgtggctgttcagacgggcaggaagctggttcatcccggctgtcatgactggcatcattaagagagacataccaaatgcacgaattgaatagatcagcatgatgtgtgtatatggtgtatcaattgtcaattgcgtgtattgatacgttgttaccactgtcacgagaagcccgataatcgcaagcggtctcggtccgaatttatcgaacaaaatacctgagatcggtgacataatcagcataacgatcgcacccggaagcagaagcagaccggattgaagcgccgtaaagccgaccaggttttgcagataaatcggtaaaaggaacataccagtgtaaagtgccactgtaataatgatattaatgacactcgagagtgagaaaatgtcatatttaaacactctgaaatcaagcatcggatcatcatgacgcaattgctgaacaacaaaagcaacaattgcaatggctccgataataactgtagacaatacaatcgggtcggtccagccgtcagatccggcttcactgactccgtataataaggaggcgaatccgacaatcgagaggattgcgccaagagtatcgagtttgattttttgcggctccaccatatttttaaagatgaagaaagccacaatgataacaattgcgccgatcggcacaagtccgtaaaacataatgcgccatgtataatgctcaataatccacccggaaagagtcgggccgaccgctggagcaaacatcatcgctagcccgaaaatccccattcctttccccctgctttcaggcgggaaaattaacagaatggttgtcataacgagcggctgcaagatacctccgcccacggcctgaatcaaacggccgatcagcattgtagagaagttaggtgcgataccgcagactaacgtaccgagcgtaaaacaaaacatcgcgacgagaaagagactccgctggccaaatcgtgtaatcaggaaagcagataacggaatcaatacaccgttaacaagcatgtaacctgttgtcagccactgaatcgtcgttgcacttacgccaaattcagtcattaagtgcggcattgcaacattaagcagtgtttggtttagaattgccaaaaataaacccgccattagcacaatcagcaatgacatagggttttttgcatttttttctttgcctgtagccatctaagacaacctcctttcatggtttgatgactgatctgttttactcagaaattttaacagatgcattcattccaggaagcaccttatcagatgggtttttgattgaaattttcacaggaactttttgtgttacttttgtgtagtttccgcttgaatttgtagaaggaagcatatcaaaagttgagttagtcgcataaccaatttcttctacagtaccgtcaaatgtagtatcagggtctccgtcaactactacgtctacactatttcctacttcaatatccgcaatatctgtttctttaatatttgctgtgatgtataggttgtccatgtcaatcgtttgtgcaattgttgtaccagcttgtacggtttgtccgtttttcacttcgtttttcacaattgtgccatccataatggattttacgtcaacagtttgttcacctttgatttttgcaactgtgtcgccttttttcactgtttttccttcgtccagatcccagtcagatactttacctgctgctggagcagtaatagcagccatatcgcccgctacttttgcttcatctgtttttacgtagtttgtgctttgataatagtagtaagcacctccagctataattgcaagaacaacaatcaaaccgataatgttggtcagaattaaacgtcctctgttcattttgttttctcctttcgtttcatcctctatcattttgcggaaagctggtgaaaatatgtgagaagtttttaattaccgcttttttctgaacagccttcagcaagcttcgttaaacttccggctagtttgcgcaaatactgcagctgggaggtatcaagcttttggtacaagccagcacccatttttgcatattgcacagcggctttttctatcagttcttccccctcttcggttaactgaatcatgacgatacggcggtcatccggactgtcatatcgattcatcaattggcgcttatacagaatatctgtcatccgcgtcacagaagcaggcttaagatcaagcgacattgccagcttgcttagcggggtgcttccgctttgatgaattttaaacatcagcaaatattgaaggactgtaatatcaaaaggctcaagcacaatctccaatatcttcttctgttttttatatatcgcccgagacgtatcgaagagctgttcaaaagtgagcaaagcacgttctgattcagtcaactccttttcacctcattcctcaataatagttcacaagataaaatattaataaatgaaagaagatttgtcaaaggaaaaatttctttttctcccgtatttttttcgcaagcgttttcttgcttttattaaataaaaaaaagccctgaaatgggcttttcattacgaaaattgatggcttacaccagactcttcatttctgaaaaagttctttagagcctgaaaaacatcagatttctgttttaaaatatagtacttaaatttctcatcttttacatttttatatgcagacattaacgttgaatgcctgttgtactgattgacctcgccgtagcaaaacagattggccttcttcataatatcattgaccagcttcacacagcgcgcgttatcagatgtcaggttgtcaccgtcagaaaaatgaaacgggtaaatgttatagcgggcgggattgtacttttcatcaataagctcaagcgacttccgatatacggaagaacaaattgttccgccgctttctccctttgagaaaaaatcctcctccgagaccactcttgcttctgtatgatgggcaataaattcaatttccacagtctcgtattttgtccgcaaaaaacgggtcatccagaaaaagaagcttctggccatgtatttttcccaaacccccatactgccgcttgtatccatcatggctaaaacgacggcttttgattcgggctttgtgatgtcattccacgtcttatatttcaggtcctccggataaattgggtagaacgacggttttcctgacattgcgtttcgtttaaaggctgacatcatcgttcttttcttatcaatattaccggttaaccctgttttacggatatcattaaactcgatatctgtatgaatgatattgtcccgctctttttgctggagattcggaagctctaattctttaaaaagcgcttcttctaaatccattaatgaaacttccgcttcataataatcctcgcctgcctgatcaccggcaccctgcccttttccaggcccttgttttttgtctgatccatcccgggccacaacatctccaacctggctctcgccgtctccttgccctacatgtttatttttatcatagttataacggattttatactcatcaagtgaacggattgggatcttcactacatcttttccattagacataataatgctttcctcagttacgaggtccggaagattgtttttgatcgcttcctgcacttttttctggtggcgctgctggtcatcgaagcctttgcgatggagggaccagttttcctcagaaatcaaaaaatggccgctgtcattttgggacatgaattcccctccttaaccatttgtggtcgtgatacatacgtattccggcttgtgccagattatgaaacaagtcttttgaaaagatttatattcatcatatgcacatatgcacgtttaattgacaaactatttagaaaatgggacaaaataacccgccctattcggacgggtcacgttgcttatcggttcagcaggctgccgacatatttcagcagctcattggcgctcgtcgagttgtagccgtgctcatcaattaaacgggccacgacttcatttacctttttcagctgctgctcatccggcgtttttgttgaggtcgtaattttaacgacatccttcagatcagcaaacagctttttctgaatagcttcacgcagtctttcatgggaattgtaatcaaaccgcttgccttttctcgcataggccgagatgcggattaaaatttcttcgcggaacgcttttttggcgttttccgaaatgccgatctgctcttcgatggatctcatcagcttttcgtcagggttcatttcctctcctgtcaaaggatcacgaagcttgtttttattgcaataggcctctacgttatcgaggtaattgtccataagtgtttttgctgattcttcatatgaataaacaaacgctttttgaacttcctttttcgcaatatcgtcatattccttgcgggcggcagagataaaattcaaataccgctccctgtcctcgcttgaaattgatgggtgctgatcaagaccttcttttaaggagcgaaggacatcgagagaattaatcgattccatattttttctgataatcgttgaagaaatccggttgatcacgtaccgcggatcaattccgctcatgccttcatcattatattcttttttcatatcctcaacgtcgacagagttatatccttccacactttccccatcatacagtctcattttcttgaccagatcaatatccgaccgcttcggctcttttaaccgggtaaggattgagaacatcgcggcgaccttcaacgtatgcggggcaatatgaacatccgccacatcgctttctgcaatcattttttcataaattctctcttcctcagacacttttaaattataaggaaccggcatcacgatgattcttgagtgcagggcttcattcttcttattagaaataaatgagcgatactccgtttcattcgtgtgagccacgatcagctcatcagcagaaattaacgcaaaccgcccagctttaaaattcccttcctgtgtcaaggaaagcaaatgccagagaaatttctcatcacatttcagcatctcctgaaactccatcatcccgcggttcgctttattcagctctccgtcaaatcgataagcgcgcggatctgattctgaaccgtactcggcgattgttgagaaatcaatactccccgtcaaatcggcaatatcctgagatttcggatcagagggactgaatgttccaattcccgtacgcttatcttctgaaaagaagatgcgctccaccttcacatcctcaattcttcctccgtactcttcctccagcctcatgacatttaaaggagaaagacttccttctattctaatgccgtattctctgtaaaagtcatcgcgtaaatgatgggggattaaatgtagagggtcctcgtgcatcgggcagcctttaatcgcatatacagcgccattatctgtcagcgtgtacgcttcgagaccttttttaagcattgtgaccagcgtggatttaccgccgctcacaggccccatcagcaatagaatccgctttctgacatctagacgtttggcagccggatgaaaatactcttccacaagacgctccagagattcttcaagcccgaacagctcgcggtcaaaaaaactgtacttcttgcgtccgtcaatctcctctatcccgctgtcttttatcatattaaaaactcgagaatgagcagattgcgcgaccatcggattttctttaataatctccaaataatcggcgaaagttccttcccatttcagccgctgctcttcctctctgtacttttcaattttctttaatatatccataaggacctcctctatcatgtttgatacactatgcaaataaggtactttgatacaatctatgccgccatctcgtgatacatgctttggtttcttaaaaataaagatactcatacatcgttgacaaggcagactgcgaccgttcataataaagaaaaatacagaatcatccagactcggacagcacggaaaaattgaagagggggagagacggtgaaaacaatcatcatgatgggtgtcattgtcacttttttagtatcaatttttaccgcaggatacgaaagcaagcctggaaaagaataaaaaagggtgctcctgaaagagcaccctttttgtataacagaacaatgttttacagttttgttttttctttaatctgtgaatgcggatcgcattcacatttgtattcgtactcaatcgttccgatgctgcatcccggcccgatgatcacttcttttcccctgacaactgccgcttcggtattctccaaataaacccgatctccttctatgacatcggcgatcagcttccctttcttccggctaaaaaaactcgcgcgtcttttcactgtaattgttgttccgccgatttcctgcacatggcttatatcatggctcaatcccagcttgatctcacccgaatttaataaccccgatacatcaacacagcctgtgacatggaacatttctgtttcacaatcacctattacgctaagcttccctttcacatcgcaggattctccagtcatattcccgccaatttcagtctggcctttcagattgaatcgatcaaattgaagtgagccgctgactttcattgtcccatatatattgattttgccggctgtcagatcgcctttacattcactttctccgagcacacgcagccgctcagtctctgcttttccgagaaaaaggcccgttccgtatatgcggcagcctacagcagacagcccttctccaactataccttctcctttgatgctgacattgtgatacgcgcctcctgcggcatgcccagcgccatataattttaaatttcccagttttgttgtctccattacgatcctccttacaactttgtggatgtttcaaccgacgcgcttggatcacaggtatagtccccgctgtattcgacggtttcaatctggcaatccgggccgatgatcactttattaccgcgcacggttttcgcctttgtatttgtcaattcaatcacgtcaccttcgatcagctctgctgttagaacaggctgcggcatcaatctgagcaatgtcagcattccttttctgcaggtcacttgaagatggcggcagccgatctcccgcgcatagctttcccctgcagaaagcttaatgatcacctggtctgcatttaaaagcccgctgattttgcatttcccttctgattgaaaggtttctgtttcacaatctgcttccatgacagcttttccgctaatgtcaattccatcagccttgacagtgccgccaaatgttgatgatccagcgattttcaattgttttgcagatacctctccttgaataaaaccagtgccattcatccggatagattctgcttcaacgtctccatgtatctttcctgaaccgctgatagttaccgctttcgctttgacgctgccgtccgcttttccgtttccattaaaagaaaaagtgtcacactccacgtccccggccactgtcccgctgccattaatctcaactgattgaaatgttcctcccttagaacttcctgatccatttatcaccagcttttccactacatccattgatggccctcctgcataaatgttgtttttaattcctctgaagcttttaataaatctacccgttccacaacctttacggatgattcaaacaaaatgctgtccgccgcagccgctataaaacaagttgtgacaccgagcttgcggagcacaatcagctccgtctgtttttcaatctcttcagtatcatgcttctttaatacctctgcagccatttttgcttctgcaaggctgacatttccagactgcagcaggccctcaagcacaaacagcgaaagcaaatcgctggatgaaaaaaccggacttcctccgtcttctgaataggcttcaagagcaggccttgaaaccaaacctttatgaagcaattcatcagcggtcatgctgacatccttcattttcggcgacagcatttccctcatttcatccaaagacaaattttctttcatcttttgaatcattgatatacgttttaaaatctcctctctcggaaaaaacgtctcttgccctgtaaatgtggatttacgaataaaccattcctcaggtattaagtttttccgcttccatcgatacagctgaccgtatgaaatcgatgttctttcaagtaattcttttttagagattaattgttcttccataagtccagctcctttgatgggtacattgtaacataacactgttacgttgttaagcccaaaaacgaaacaaagcatttcaacatccgcaaaaaaacccgcccatcatcgatgagcgggtttttcactattttaaatcacggtaattttgctggcgcagcgcttcataaacaagaatcgcggcagtattggacagatttaacgatctgacatgctctgtcatcggaagacgcaggcagcggtccatattattttgaattaaatcctttggcaaaccgcttgtttctcttccgaacacgaagaaataatcctcgtcaagatcagtgtaatcaaatgatgtatgaggctgctggccaaattttgtaataaagaaaaacttgccttttttatatgcctcaaacaattcttctaacgaatcatgatacacaacgttaacaaactcccaataatcgagtccggcacgcttcagcattttatcatccgttgaaaagccgagcggacgaatcaggtgtagcgttgtattggttgctgcacaagtacgtgcaatattccctgtgttagcgggaatttctggttgatataaaacgacatgtaatgccacaatgttcacctctgtttttcttatccgcccatcattataacattaattactcttttgtcgtatcatcaacgatatgaaaaaaggcatatcgtattgacggcgtgtatgccgtagaatcctcatatgaccaatacctcatcctgctgtcataagtctgggcgttgacaagcggcatattgcctttgtcctttgccacgacaatcgttgtatgattaaaccggccgtctccttcgaagtcatagcaaatcacatcgcccggcatcagttcttccgctgatttcacccgcaccgcacgcagtccggcctttgaattcgacaaatacattttcatagagtgagccaccgtccagctgtagctccatgagctttgtttcatccaccagcctgatcccctgttcggatgaccgcgcatcggcgcgcctcctgcatgaagacactgagaaataaaatttgtacagttatcgctgaaatttttataagcaggattgcgcttgttccaaaatttctcggcatattggacagcgccgagacgatcgtattgaaaagccctgccaaacgcttctctttcctcttcagcttcagaatagtcaataatactggtcccttcatgaaatccagccggctttttcgcaatttcctgatcactaatcaaaatgtgatcatacaggaaagccattcgctcctctatgtgctcttctatatacaagctgtcatcttgttccttacacacgtattcgtaatggatggtatacgaaaggcaggtcgttccgtcatcctcaacccgcacatgattaatcacggcctttgctttcgcttttatgatgtcaactttacgtttttccagaagctttttcttacgctccatgactttaaggtctccgacttgagactcctgtctcatagcatgcccgttaaccagaaagcccagccgctcctccgctaattgttctaaaatgtacttcaagctcaccccacccgccatacttttttatagagaaaaaacacttggatgatctcaagtgttttttccttctgctctatacgtatgtcaggacaggccttgtttagtcatgcctgaagcttttagcaactcaattcctttttcaatttccagctttgcctcttcatccttctctttttccagcgctttttcaagctcttccgcgtaggcggggtctccgatttttccgattgcccatgcggctgtccccctgatgacaggacgcggatccttgtgcatcagttccgtcaattcaggcagtgcggaagcatccttaaaatgggcaagcgcgagaatggcgtttcgctgaatcggtttttttccgcgccaagaacctgagacatgcccgaatttctccttaaattcccgattgctgatggccaaaagcggcttcaataacggtttggcaatctcaggatcaggctccatttccggatgaagatgaaaatccttccctttattgagagggcataccgtttggcacgtatcgcacccgtacaggcggtttccgatttttgtccggaattcatcaggcaaaaatccttttgtctgggtcagaaaagagatgcagcgctgcgcattaagctgcccgggattaaccagtgctcccgttgggcaggcgtccaagcatttcgtgcaggacccgcacatatcttcaatcggcacatcaggctcaaaagggatatttgtgatcatttccgccaaatacacataagagccatactcgggtgttgtgatcatacagtttttcgcactgaatccgattccggcacgttccgcaacggcgcgatcagacaattcacctgtatcaaccattgacttcgttctgatatcctcatgcttgctttttagaaaatcctccagcagatcaagcttttccctcagcacatcatgatagtcttttccccaggaagctctgcaaaaaatgcccctgcgctcagttctcgtgcttctcggcgcatccttcattctggaaggatatgcgagagcaattgccactattgatttcgctttcggcaaaagaagcttcggcgtcacccttttttcgatatctggctcttcaaagccggagagatagccgagtgattcttgaagaatcaaacggtcttttaaactgtcaaaagtatcagcggtcgtaaaaccaatcttgtctacgccaatgcttttcgcgtattcaattaattcttctttgagctgataaacgttcatgttttgcacagcctcctttctttgtgataaaacgacacagcgtttataataggttgatatcacgtaactggagtgaatgctagtgaatatcaaacttgattctgttattactgaacgtgcggccggcttacatgcagctgctgtcatttatgagaatatcgaagtcggctcctcaccgcaaatgctgaaaggcagactccgcctgtttcaagaatccttgtttttcgactatgcggacggcggtatatccgatgaatccttcgtcaaggaatggcagaaactctttaaacagcttaacccttcatttgagggagaaacaaccccaatggaggacatgctggtcccgatatccaaggaacaattcatggaaagtaaagactcggcccatgacacaatcgattttttcgcattaaaatattctctgcctattatgatttatgatgccggaaagcttcatgagccggtccggatctcattgggagaaaaagaaaacatactgcttttctctgatgaaaacggcatttttggcgatttcaaaaacagcgtcaaccactatcccgtttcaaacgagactaagaatatgctgcaaatcatttttttcccgccatcgattgagaaaagcagcgctgttaacctcttatcatcattaacgaaaatgtttgaacaaattcacggcggcacccatacagtacattggcttacgtaaaagaacacgaataccgtgttctttttcacataaaaaaacgcaatacttcgtttatctgagaaacgaaacactgcgttaataacgtatgtatggagcgggtgatgagaatcgaactcacgacatcagcttggaaggctgaggttttaccactaaactacacccgcatttgtgattgtcagcaacagtaccgctctgactttttttatattacatgtttatttatttttcgtcaagggaatataaaaattttgtcgaaaaaaagttatctttttgtaaagttgttaagttccatttacataatgttaagtatactatacaatataatcaatcgagattgtgaaggggacagacgtcatgatgaaaaataaagtaaaagagctgagggcacgcttcggctattctcaggaaaaactcggagaaacggtcggcgtcacaagacagactgtggcagcgattgaaaaaggcgattatgttccctcactgctgttagcactgaaaatctgcaaagccttctccatgaaaatggaggatgtcttttggttagaggaggaaaactaagatgagcatgaaaacaaaagcagcttttcaccttgttttatttggccttgcatgctgggcgctgatttcatactttgaagcctcagaaggcatagcatcttttttcggcacaaagagcggcgggatggtatttgatttaaacctcactccctttattctgtttgttgcggcgtctgcggtttatttgtacttacagaaaaaaagccgccctgccagaaagcagctacttctgcctgatgagtttgaagagcaggatgaaagagagcagatgatgacggcaaaagcatgtcgcgcgtcatatatcgctgtctacttctcgctgcctgccgcagcggttcttctcattttttatccgctatttcaatcgcgcattccgtttttccctattattattgtgtttatcatcatgatcatccagcacctttcctacgtcatctctttcaagaaaaacgaaaaaaactccggcgcgctgtaatcggccggagttttttcttaccagcttgcttttttcacaccgggaatctggcctttatgggccagctccctgaaagcgattctggacattttaaacttcctcatatatgctctcgggcgccccgttaccatgcagcggttgtgaagccttcccggtgctgaatctcttggcagcttgctgagtgcctcgtaatctcctttttccttcaactcgcgtctaataccagcgtattgctcaacaagctgttggcgttttaactcttttgccacttttgattttttagccaagtcacatagcctccctttaaatcgaaattgttacgatttaaaatgtatcattcaccattcaaaaaagcaagcataccgctttgtaaaacagacggcctgaagccgcccattctaatgatgcaattccacataatacagtaacgcatcttgatgcttaatgagctcttttttatgttcagaggtgtgcattgtctcgtcagtccctctaatactgctgccgatcaaagcaggcttctcgaaagtaatcggttccggcgatgaaatattctgagtcatttcctgtgttgtgctatcgtcgcgtttcaccgatgaatcagccgctatagttccctgtttatccacaatgccaaaatgaatggtggtatgtttattctttccttccccctcttcattctcaaaataaacaaattgtatggtatcagttttttcctctgaataatctgcacgaaccggtccaaacctctcaacaagctttcccttttgataatgttcgatgtacatgtcagctgaagaaataccttcaccgatattgacggcttcggcagtgaatgcctgtgaagctgcgacatccattctgtttttttcaagatctgatatgtccgccgctttgatttccatctgttttgaatgtccgcatgctgacagcatagctatgaggcaaatgactgccgcgcttctcaatgttttcagaaaaaaagccccctttttttgaatatcataccatgttcggggggctgtattttagttaaactcatgcatttttctctttgacaaaataagtgtttcctaccgcttctccccttttgttctgaagctttctcgtccgatcattttcaaacggcaaaagcggaaatacaagctctgcaaaataatacgcttcttctaaatgcggatagccggagaatataaacgattctatgccgagtgcctggtactccgctatccggtcggcaatcgtctgcggatcaccgacaagagctgttcctgcccctcctctgaccaggccgatccccgcccacagattcgggctgatttcaagcttcgtccgatcgccttgatgaaggacggccatccgctgctggcctgaagagtcgtaacggctcaaagctgcctgcgctttggcaatggtgtcatcatccaagtggctgatcaagcgctctgccgcttcccatgcctcttgttcagtttcacgggcaatgacatgcagcctaatgccaaatcgaacggatctcccttcttttgccgcttgctttttgactctttctatcttttcttttacttgttcaggcggctcaccccatgtcaagtacacgtctgtatgctttgcggcagcttcaattccagcctgtgacgaaccaccgaaatagatgggcggatgcggctcttgctgcggcgggaaaagcagattgctgttttccacttttatatgctttccttcataggaaaccgtttctccctgcaaaagtctccgccaaacggttaaaaattcgtctgttgcctcgtagcgctcatcatggctgataaacaggccatcgcctgccagctcatacggatcgccccctgccacaacgttgatcagcagccggccgtctgaaatgcggtctagggtggatgtcattctggctgccagagaaggctgcattaaaccaggtcttaccgcgactaaaaactttaagtcctttgtttctcctgccagtgccgacgctgtaagccacgggtcctcgcacgatcttcccgttggcagaagaactcctgtatatcccagcctgtctgccgcctgcgcgacttgtttaaagtaaagatgatccgcagtccgtccatcactttcagatcctaaatatctcgcgtctccatgagtcggtataaaccaaagaatttccatattcatctcccctttatatcttttatccttcgtagctgtttctccactttaacagctttcgttcaagcagcctgacgaaggaatccgtcagctttccaaccactgcaaaaatgataatccctgcaaagactttattcgtttgtgaaaactgtctcgcatccatgatcatatagccgactcccgagcttgagcccatcagctctgccacaacgagcccgagccatgcaatgccgagcgataagcgaatgcctagcaatatattgggcagggctgccggcaatatcactttggatatctgctgatgccatttaaattcaagcacccgggcgacttcaaacagcttcgcgtcaaccccgcggatgccgttaaacgtattgatatagacaggaaagaaggcaccgagcgcaatcagcaaaattttagatacttcgtcaaatccgaaccataaaataaacagcggcgtgacggccagatgaggtacggttctaagcatttgcaacgacggatcaagatacagctccgtccgtttggaaaatccggccaaaatcccgatcatcaatccaagccccgcgccaagcaaaaaaccaagtgccgcccgataaatgctgatttgcagatggccgaacagttcgccggacaaaataagctccttaaaggtcagaacaatcgtaacaggtgtaggcagcactgtagcggacacaacccccagcccgccgatgacctgccagatggcaatgatgacagcgggcagtaaaagccccttcatccagccgtatctcttccttccgggcttttttcgcaccgcttccgcattcgttttgggcagcgagcccgcagcctctgctttcatcattgatcacctcctgaggaatgctcctctaatgcttttttgataaaagtgttatcgacaacatccttcacatcaatcttcttatctatcgcctttgttcgaaattgaaaatctgctgtttcctgctgtgctttcacaatgtcgtcactgatgatctcattaagtggctcagtatttttcagcacattttcgacgacctttttatcgagatctttaatgtcagaatataagtccgctgcttcatccagatgttccttttgccatacaacggctttattaaacaccttcagaaaacggaccacttcgtctggatgctcttctgaaaactttgttcttactaaagtaaaacccggtgaatataaatctgtgctttctccgttcacaaggatttttgctccgtgtttcattgtttctaaggacaagtacggctcccaaatggaccaggcatcaacagatccgttttcaaatgcggaagctgcttcatcaggctgaagctgaataattgtcacatcgttagctgacaaccccacttgatcaagcgctttatacaaaaaatcaaacccgctgctgcctttggcgactgcaattttcttcccctttaagcccttaacgtcttgaatgccgctgttttgattgacaaggatgccgtttgctttcaagccgtcctgagacaaaccgatttctttaaagtcaatgcctgccgcctgtccagcgatcacaggcgaattaccgacttgagaaaaatcaagtttgtctgccgcaaggccttcaaattggggcggaccgctttgaaactccacccatttcactttgatgccttctttttcaaatgcatcttcgaaccagcctttttcttttgcaatcaaaagggggcttaagctttgctgaataccaatacgaatttccttcaattgtttgtggtcaccgctggctccatttgctccacagcctgcgagcagaaaaataacggcaaccaatacaatgagtccttttttcatttccgcttccgccctttctatatccctgatccttctgcgtactccaaatcttctgttttctcgaattccgacagcactctctgtctgatcgcttggaaatccggagtcgtccggtttcgcggatacgccaggtgaatgggcatcagcttatggattttccccggtttggccttaaggatcgcaagctcatttcctaaataaacagattcatctatatcatgagtcacgagaatcatcgttgtttttttcttcctccatatatccagcagcacgtcctgcaggtgttttcttgtaaaagcgtcgagtgcaccaaacggttcatctaaaagcagcacctcaggctcccgcagcagggcccgggcgatggctactctttgtgacatgccgcctgacagctcgcgcggatatgctttttccgatcctttcaatctgacaatctcgatcagttcatccaccttttgtttgacttttgggtccttcaaattcaagtcggctgcaatattctgctcaacagtcagccaaggaaagaggcggtgttcctgaaaaataaatccttgctgaatacccggagctgttacgctgcggccgttaatttccacactcccgtcatattcagaatcaagccctgcaataatctttaacagggtgctttttccgcacccgctcggtccgataagcgttagaaattcgcctggtgcgattgataattctatgttttctaagaccgtgtttttgcggccttcttgaacaaatgccttttctttgatgctgatggtcacagccacttttatccctctctttctgccaaccccgccttcaaaaaaaacaaaaaggcccccatctctgttcttgtagagatgagagccttcggcggtccgatcagctgcccaattgtttttttgtttgaataacatgttaattcaaattattccgatatgtcaactcttttttaaatacgatttttgatatccttgtttatcacttactctgcttgtttcgcaaatagagaaggaaaaattatttctccaaaaattattaagtgtcataaaaagctgttacaacaaggtttttcaacaatttcgatactatatatcgattaatagagataactattttataataattataaaataatattgactttttacttagagatgatattatgttcttataaattccaagaggtgataacatgagttcaaataaactgacaactagctggggcgctccggttggagataatcaaaactcaatgactgccggttctcgcggaccaactttaattcaagatgtacatttactcgaaaaattggcccatttcaaccgagaacgtgttcctgaacgtgttgttcacgccaaaggagcaggcgcacacggatattttgaagtgacaaacgacgtaacaaaatacacgaaagccgctttcctttctgaagtcggcaaacgcacaccgttgttcatccgtttctcaacagttgccggtgaacttggctctgctgacacagttcgcgacccgcgcggatttgctgttaaattttatactgaagaaggaaactacgacatcgtcggcaacaatacgcctgtattctttatccgcgatgcgattaagttccctgatttcatccatacacaaaaaagagatccaaaaacacacctgaaaaaccctacggctgtatgggatttctggtcactttcaccagagtcactgcaccaagtgacaatcctgatgtctgaccgcggaattcctgcgacacttcgccacatgcacggcttcggaagccatacattcaaatggacaaatgccgaaggcgaaggcgtatggattaaatatcactttaaaacagaacaaggcgtgaaaaaccttgatgtcaatacggcagcaaaaattgccggtgaaaaccctgattaccatacagaagaccttttcaacgcaatcgaaaacggtgattatcctgcatggaaactatatgtgcaaatcatgcctttagaagatgcaaatacgtaccgtttcgatccgtttgatgtcacaaaagtttggtctcaaaaagactacccgttaatcgaggtcggacgcatggttctagacagaaatccggaaaactactttgcagaggtagaacaagcgacattttcacctggaaccctcgtgcctggtattgatgtttcaccggataaaatgcttcaaggtcgactttttgcttatcatgatgcacaccgctaccgtgtcggtgcaaaccatcaagcgctgccaatcaaccgcgcacgcaacaaagtaaacaattatcagcgtgatgggcaaatgcgttttgatgataacggcggcggatctgtgtattacgagcctaacagcttcggcggtccaaaagagtcacctgaggataagcaagcagcatatccggtacaaggtatcgctgacagcgtaagctacgatcactacgatcactacactcaagccggcgatctgtatcgtttaatgagtgaagatgaacgtacccgccttgttgaaaatatcgttaatgccatgaagccggtagaaaaagaagaaatcaagctgcgccaaatcgagcacttctacaaagcggatcctgaatacggaaaacgcgtggcagaaggccttggattgccgattaaaaaagattcttaatggagaaatgcaaaaacccgttgtagtcagcgggtttttttatatttagttacacattgcgtatgcttctcatcaatcttcatataaatttcttccatgagttccgcgctgtttataatctctcgtttgtttttttcaatcagcagctcaagcggcaaaatctgattcccgtaggtttttcgcttcctgaatcgttttctccccttttcttttttgactcccatcaataatcccccctttttcatacaaaaaaggcccttatctaaacgataagagccttcggtgttccgatcagcgcgataaatttgaaaaatttgtactgaccatgttaattcatacaataccgacctgtcaactattttttgagggtgttgacactgtatcagattgcatccccgctttttccttatacactcttttcccctgacgcataagctagagaaactagaatacgagagaaagagatgtgggagtgtggaaaagacaaaattgaccggacgtatcgtgacacgggatgatccggactataacgaagcaagaaccaatattaacctaagcttagaaaggtatcctgacatcattgtgttttgccaaaacaaacaggatgcactcaatgcgctgaaatgggcgcgtgaaaaccgtgtgcctttccgtattagaggcggcagacacagctatgagaacttttcccttttaaataacggtcttgttattgatttaagcgagatgaaaaaaataactgtgaatcaggataaaaagctggcctatattgaagcgggggctgaattgggagaagtctatcggacactctggcaatacggcctgacgcttcccgcaggcaccattgctaatgtagggctcacaggtttaactctcggagggggaattggacttttaacaagggctgccggtcttacttgcgacagcctcgtgcagcttgagatgatcgtagcagacgaaaaagagggcgctgatctgattacagtcagctgttcaaatcatccagacttattttgggcgtctcagggaggcggaggaggcaatttcggcatagtcacctccatgacatttaaagcagtgcccatctctcaagtgtcgattttttctattacatggggatgggatgattttgaggaagtatataacacgtggcagaactgggccccgtatacagatgaccggcttacatcatcaatagagttttggcctaaagaagtaaaccgcatagaagccctcggccaatttgtcgggccaaaaacagagttaaaaaaactgttaaagcctttattgaaagcaggaagtccgacaagcggaatggtaaaaacaacgccattcattgaagcggtaaccttttttaacagcccgggaggcaatcagcctcaaaaaatgaaacgctccggctctttcattgaaaagccattatcagaacgtgcgatctcaacaataaaacactttttagagcacgctccgaatcaaaacgccagtgtctggcagcaagcactcggcggggcagccggacgggtcgctcccgaccaaacggcattttattatcgtgacgcaatcatcgcccaggaatacttaacaaactggacatcccctggagaaaaaagacaaaatgtccgctggattgaggggctgagaacgtccctttcgaaagaaacgatgggagactacgtaaattggccagatatcgaaatcagaaactggccaagaacatattacggcgaaaacgttgaacgactccgccgtgtcaaaacgacatatgatccagaaaatgttttccgctttgaacagagtattcctccgcttcgacgctctctgtttttctaaaaaaatgaagatggagcattctccatcttcattttttttattgatataaattgcttcccgtatcgacaaactcttttgctttttcttttaatcctttatttatggcttctgcttcactgagatcgtttttcttcgcataatcccgaatatcctgtgaaattctcatgctgcaaaatttcggaccgcacatggaacaaaagtgagcggtttttgctccttcagcaggcagggtttcatcatggtattcaagggctctctccggatcaagagataaattaaactgatcccgccagcggaattcaaaacgggctttcgataacgcatcatcccggatttgcgctccgggatgcccttttgcaaggtccgcagcgtgcgcagcgatcttatatgtaatgactccttcacgaacatcatcacggtttggcagccccaaatgctccttcggcgttacataacaaagcattgctgtcccgtaccaaccgatcatcgccgctccgatcgctgaagtaatatggtcatatcccggagcaatatccgttgtcaacggccccaatgtgtaaaaaggcgcttctttacaaatgtccatttgtttatcgacgttctctttgattttatgcatcggaacatgtccaggaccctcaatcatcacctgaacatcatgcttccaggcaatttgcgtcagctctccaagcgtctctaattcagcaaactgcgcttcgtcattggcatcagcaattgatccgggacgcaaaccatccccaagagagaaagcaatatcatacattttcataatctcacatatttcttcaaaatgtgtgtataaaaagctttcttgatgatgagccagacaccactgcgccataatcgctcccccgcgtgacacgataccagttgtccgtttggcagtcagcggtacatacctaagcaaaacacccgcgtgaatcgtaaaataatccactccctgctctgcctgctcgattagcgtatcacgataaatctcccacgttaaatcctcagctacgccgtttactttttcaagcgcctgataaatcggaacagttcccacaggcacggggcaattgcggataatccattcacgcgtcgtatgaatatcttttccggtagagagatccatcatcgtatccgctccccagcggatggcccacgtcattttttccacttcttcttcaatggatgacgtaaccgctgaattcccgatatttgcattaatcttcacatgaaaattccggccgataatcattggctcactttcagggtgattaatgtttgaaggaataatcgcccggccgctggctacctcgtctctgacgaattcaggagacacatgctcacgaatggcgataaattccatctcaggtgtaatgatccccttttttgcatagtgcatttgtgtgacattttgacctgccttcgccctcagcggtttccgctttaatcctggatagcttacgtttggttttgcttttttataaccgttatcttctggttttatagcccgaccttcatactcttccacgtcaccgcgctctgtgatccatttttggcggagcggctttaatccttcttgaatattaatggttacttcagggtccgtatacggtccgcttgtatcatagacacgcacaggcgcgttttcctcttcgccgaacgatcccgtcgtcggactcaatgcaatctccctcatcggcacttggatgtccgaagaagaaccctccacgtataccttcttgctgcctgaaaaacttgacataatggaaatgttggcttgctgcactgaattgttttgcattacttttccttcccctttctacgtttgaaaggacaaaatcaagcccataaccagcacaaaaaaccggattcatataaatgaacccggttacagtcagaaagaaacatattattgcccagcaagacaataacaaaaacaattcctctacttccccacgctggtacgaaccagatcaggtccaaagggttaagaagcttgccttctctctcagcccgaaagcgggcacccccagtaactattgatttcgcactcatcttatcataaaatcaatctgaaaaaaagaggaatatagataatattcagccaatttcaccctaaatatttgaccggcaacgggatttcagctatttcatgttcagccatcatcacccgatatgcctttgcacccgaccttgaactcacagtctgaaacagctgatcatttatgaaatggagagcagccccatcatccgctgcatagccactgcataagaacttgttagatatcagctggtggtatgccggtctccgatccttttccccgtcataatggggacaaaagctcccttgcaaaaaacctaaacttttcaaacttgtcagcggtccggctgaatctgtcaccccttcttcaaaccagcagatcgcaccggcacttattccagctacaaccacaccgttcttccatgcttccctgagaatatggtccagcccccactctttccataacacaagtaaattccgcgtatttcccccgccaacataaatcacgtccatttccataacaaaagaaactaaatctgatgatggtggcttaaacaaagataaatgagacggcacgcaatccaatgtttgaaatgcatgataaaaccgctgaatatagttttgggaatctccgctcgccgtcggcaaaaaacaaatacgaggctgctctcgttttgattgattgaggatatattgatcgagggacaaattatccggctccatcgaaaaacccccgccccccatcgcaataatctgcttcatcatcacaccccccaacaaaatttgttgcttattatagcattttgtatagaagcaagaaacaaagtcaaatactttcttatcaggagctgctaaaaaaacaaaggaggtggtttcccattgaacaaagtctttgtcccaaagatattcttgatttgttaacaacaataaaaaccagcattaacaaatacactgtcgcaacaacagcaaccgaaaatccccacatcagaagagcattgcatgatcaattagatacagctgtttatctccatgatgaactgtcagatcttctgttagaaaaggggtggctcgggtgagcaattccaaatcgattcgcttttatcttacagcaaagaccacaaaaagagacgggatctcaaagatgagatgccgtctcttttttattgctccactcttcttaaagcctcatttaccgtttcttttataaacacgtcttcaccgcttaatcggtctaaactgagatcgccgtttctcagcctttcggaaatattgtttatatcctcctctactgtgatttgcagctcaccagccaaaaacattctgtgtaattcatctgcaaccaaactttctttattcacttccatcgactcctttattttcaatattattcttagtctgtccctaggccgagacgaataataggaaaaaagtatgaatcaaacgaatcttttttcctccttcttacgtatatctgttgagaaaaaagaaaaaggggaagatctaacatgtcattttttaagaagcttgcggcaagtgccggaattggagctgcaaaagtagatacaattttagaaaaagacgcatattttccaggagaagaagtacagggaacggtacatgtcaaaggcggaaaaatcgctcaggacatccgttatatcgatttacagcttagcacacggtatgtcattgtaaaagacgatgaagagcaccggaaatacgctacaattcattctttccgggtcactggttcatttaccatacagcctggtgaagagcatcaatttccgttcacattcactctgcctctagatacgccgatcactgtagggaaagtagaggttgccgtggtgacagaccttgacattcaaggcggtatcgataaatccgatcatgaccgcattttcgttgaagcgcacccttggattgaaaatgtgcttgaagcaatcgaaaacctgggcttccgtcttaacgaagcagactgcgaacaagcgccctacttccagcgtcgtcttccgttcgttcaagaattcgaattcgttccgacttccggatattatcgtcagatgcttgatgaattagagctcattttccttttagacgaagacggtttggaaatcattttcgaagtcgaccgcagagcaagaggactccgagggtggttggaagagatgtataatgacggagaacagcttgtacgcgtccgtttcagccaatcagagcttgaagatacagaagagctagaagaggtgctagaagagatcctagaccaatacgctgagtaagtataaaaaggagccgaggctccttttctttaataaaaaataaaaacccgtttctgttaagaaacgggtttttcagtataccggtggtcggggtcgaaccgacactccagaaggaacacgattttgagtcgtgcgcgtctgccaattccgccacaccggcaagttttacgtcgtatctaaccgacgaatataaatatatcatggatctcataaagtgtcaacgtatttcaaaaaagtttttatggaaatataaaataaaagtgttgaaagactagctatacagccgctttataataggcctcggaacttaacttgttatgataaatcaaagcattaaaaaaatgatctacttatgtagatcattaatatgattagttataatgataaaacacaaacaccaattcaacttaccatgtaagtaaaattggtgccgagggccggacttgaaccggcacggtagtcacctaccgcaggattttaagtcctgtgtgtctgccaattccaccaccccggcaataagaaggcgacacccggattcgaaccggggataaaggttttgcagacctctgccttaccacttggctatgccgccgtaattggagcggaagacgggattcgaacccgcgacccccaccttggcaaggtggtgttctaccactgaactacttccgcatttttaatggacttaatacattatatgcagttgatataaaaagtgagactgggctagctggattcgaaccaacgcatgacggagtcaaagtccgttgccttaccgcttggctatagcccaatgataatatggggcgattgatgggaatcgaacccacgagtgccagagccacaatctggtgcgttaaccacttcgccacaaccgccataatctcaagatgtcataaatttggcaggggcagtaggaatcgaacccacaccggaggttttggagacctctgttctaccgttaaactatgcccctataaatggtggaggggggcagattcgaactgccgaaccctgagggagcggatttacagtccgccgcgtttagccacttcgctacccctccacattaaattttgaaaaaacagtgccggcaagaggacttgaacccccaacctactgattacaagtcagttgctctaccaattgagctacaccggcataggtggtggctcgggacggaatcgaaccgccgacacacggattttcagtccgttgctctaccaactgagctaccgagcctaagtattcacgaggtttcttataagcctttttcatccttttccctccttccttgtaaaaaaataggctatcacgcacaactaaatattataatcctctgataattctgtcaatatttacttttagaaaaaaatgttatatctttgtggtgaagttactttttttgggagggataatatgagtgctgtaaccgaatcggttttggagtctatcatcagtcctgtaacgatgagtgagtttttagaagaatattggcctgtaaaacctttggtagccagaggagaagtggagagatttacaagcataccggggtttgaaaaggttagaacgctagaaaacgtattggctatctacaataatccagtcatggtcgttggtgatgctgtgattgaagaatctgaagggatcacagacagatttcttgtgtcacctgcagaggctttagagtggtatgaaaaaggggctgcattagagtttgatttcaccgacctatttattccccaagtcagaaggtggatagaaaaactcaaagcggaattaagactgcctgcgggtacttcttccaaagccattgtttacgcggcgaaaaatggcgggggattcaaagcccattttgacgcctacaccaacttgatttttcaaattcaaggtgagaaaacatggaagcttgccaagaatgaaaatgtgagcaatccaatgcagcactatgatttatcagaggctccttactatcctgatgatttacagtcatattggaaaggagatccgccaaaagaggatctgccagatgcagaaatcgttaatttaacaccgggaaccatgctgtatttgccaagaggtttatggcactccaccaaatctgatcaagcaacgttagctttaaatattacatttggccagcctgcatggcttgacttgatgctagcagctcttcgaaaaaaattaatcagtgataacagatttagagaactcgctgtaaatcatcaatccctacatgaatcgtccaaatcagagttaaatggatatttggaaagtctgattcaaacgttatcagagaacgcagagacattgaccccagagcaaatcttccaatctcaggattcagattttgatccttatcaatccacgcaattggtattcagacagcttttgacaagttataagttctagtaaatactagataaggggattaatgacataaaataggttgttaattctcttatttttgttcagctaaaaggaggaaaatatgaatattattccgacatgccagatacctaaagatcttgtttccgcgttttttcaaaaacactggggcagtccgcaaatggttatttctagcggtatttataactgcgatgaattagatggttatggaatgctcaacgatgataaccagattgttggccttattacatacatatttgaagaagatgcctgtgaaatcatttcgctggatagtgtcattgagaataaagggatcggaacagctctgctagagaaagccgaggaagcatgcagagagagaaatatcaaacaaataaaactgatcacaaccaatgataatattcatgcattagcgttttatcagaagagagggtaccggttggatcgactatttgtgaatgcagtcgagacggccagaaagatgaagcccgaaattcctttactggcagataataaaatacctatccgtgatgaattgcttttggtcaaggagttacaataaaaggcgctcctctaaggaagcgccttttgatcatgcgattattcagcggcctgaataaatacacccttctcatgagaaaactctttgaatccgtataccccatgataggagccgattccgcttgtgttgacgccgccgaatggcaggttgacgtcactgaaatggacgacgacatcattgatggcggcatttcctgatgtcgtgtgctgaaggacgttgtcaatcagatcttggtttttgctgaacacataaagtgcaagcggtttatcgcggtcatttacgtaatcgatgacctcgtcgatgtcttcatagttcatcattggcaggatcgatgcgaagatttcctcctgcatgattttcatgtcaggcgtgacgtttttcaaaacggttggcgagatcgtgcggtcgctggcatcgaatacgccgccgaacaccacttccgcccctctttcgatggcatcgtcgaacagatctttgacgcggttgaagttgcggtcattgacgatctgcgtaaatttgctgcggtctggggtatgatcatcctccataaatccagcgttgacgactgtttgtaaaatccccgcgaacctgtcctgaacgtcttttttaatgaacaggtaatcaggtgcgatgcaggtttggccggcgtttacgaatttcccgacggcgatctttttcgctgcgtccatcagatcgtattcactgtcaatgatcgtcgggctcttgccgccaagctcaagtgtgacagatgccaagtgtttggcagccgctgtcatgacaattttcccgacatttgtgcttccagtgaagaaaatatggtcgaacggctgatcaagtagttcggttgccacctcaacctctccttcaaaaatcgcgacttctttttcatcaaaagcgtctcttattactttagcagcaatgttgctcgtgttcatcgtgaaatcggacagcttcacaatcgcgctgtttccggctgcgagagaagcggcaagcggcgccatcgtcagcataaacggatagttccacgggccgaggatgagtgtgacgcctttaggctcgtacataagaattccgtttgcgtcagggcttaacgatgaaccgacttctttaggcgccatccattgttccaggttattcatattatctctaatcgctttttttgttccttcgatttccgcttttttgacttcgtgatatggtttgcggacgtctttgcggatcgcttcgatgatttcttcttcatgggcgatgacggaatctaaaaagcgttgaagcttttctctccgctgttccgctgttgaagcgcgcaaggctttttgctgttttttctgaagctgaaagacacgctggatgtcgtcctttacttgctgttccattgtaaaatccccctcatttgctttcttcttttctcggacctattataaggtggtaccttttctgtaagaaagacaacggtgaaccatctatacgttaccgtacatatatctaagatctgtctaatgattggaggtgtcttttgtgccggaatctgccgaagctcaagtgaaagaggcgctgctggctttattgaaagatagagatattcaacacatcacaatgaaagaaatcgctgagaaggccaaagtgagccgcggatcgctctacctttattatgaggataagttttcaatcattgaggatgtgatcgaagacatgaaggaaggactgggcaaagcgctttttgacgccttcagtcatatggatacccttcatttgaacaaaaaacggcaaacggtgcatccgacgctgtcctttgttcatgagcatcgttcctttttttctgtgatgatgaacagaggacattttcatcgtttttttaaggatgtgtttcagcaggatgtgctgctggctccgatccatgtgaatttaacgccgattgaacgggacatttatggacattatcgggccttgtacacgtacgcgattatcctgtattggctgaatgaggatgcggccgcgtctcctgaagccatcagccagaaggtatgggagcttgtttctcaaaagcggttttattggctgtttggaaaagctgtgccaggagagcgagagaaggagaagcaaatcgacaggcgggtggttcgaacgagagaggcgctgcagaaggcatttctggatgtattggcggagaaacaagactacgcgggcatcacgatttcagatattacgcgtaaaagcaatatccgccgtgcaaccttttatgatcactatgccaataaggaggaattgctccaaaccatgatacagcgatcatgtgcggagatcattgatcacctgacgattgcctccagcccgaatgaattttccttaaaggaagcggagaaggcgctcgccattctgctttctgctttgtcaaacatgcccattgtccattttctcaatcgggaatggggtgttcctcatgtgatacctgatatgttcaaagcgctggaatcgttttatctgcatcagcaaactgatattcacgcagagaaaaagctttatgcccattatgtatccgcaatgattatcgggttgcttttgtatcggctggatgaaggaaaggcgcatccgcctgaagtgctggcgagggagtttttgcagtttttggatgtgaagaaatataaggttgtattgctttaaaagacaaaaagagagggggctccctctcttatttcgtttcttccttccatttctcctcaatcagcatcttcccaggccatgtgtacgccatgatgccgccgtctgcggtgatgtcttctcctgtgacgtatgagctgtcgtctgatgcgaggaacagtgccactgttgccatttctttgggctggccaagacgtccgagcggcgtgatccatttgttggcttcgcggaattgttcgcccatttcctgttcttttgtgcctgctaatttgtcaatcagcggtgtttcgatcgtgcccggtgaaatggaattgacgcggatgccgtttcgtgcgtagtcgattgccattgcctttgtcaggttggtgataccgccttttgcggcgttgtagccggagcggtcaaggtccgcggcacggcctgacatggaggaggtgttgatgatggagcctccattttcgagcatgagcggaatcaaatatttgctgcaaaggaatgtgccgcgcaggtcgacggcgataatgcggtcaaacaggtcaaccggatattcgtgcacctttccgccttcctgatcaacgccggcattattaaacagaatatcaatcgttccgcatgcatccttgatttgatcagcaaatgctttcacactgttttcatctgacacatcgaggtgaaaggattcggcctgtcctccgttttttctgattgcgtcaactgtttcttccatttgatctttattgatatctccgatgatcacacgcgcgccttcattggcaaaaacctccgccgtcgcttgaccaatgcctgtcgcggcgcctgtgataactgctgttttgttttcaagtcttcccatgatacgagacctcctttttctatttgtcttcccgctatgtgcagtgataaacatgcgagaaaagaaaggccagcatatgttaagatgaattagaaattgttgggaggtttgtatgtttgaaggtacagcataagaaggagctcaagttttattgcatcgtgaccattccatctgcatttgttgtgctgactgtcatctcttttttattgcaagagattacgttcccggtgactgcaagcgcatttctgaatgcttcatggcataatcttttgtttttgataccgttcggtttgtttttctacccggtgcatatatggatgaagcgggagtttggccgttggaatgacacagaaaaaaagagaggatgatgaagcctctcttttttatgagaatgagtgagaaaaagagtgaaaacaaatccaactaatgttaaatttacatatatatgcatctatcaatctaattgacaattgtcatcttatgtgataaatagatgctgaaaagggtttacataatggtaaaggagcgatcaagagtggcgaaaaaagagtttaaagcagagtctaaacgcttgctggatatgatgattaactccatttatacccaaaaagaaattttcctgcgcgagttaatctccaattcgagtgatgcgattgacaaaatctattacaaagcgcttacggacgatgcgcttacgtttgataaagacagttactacataaaggtcgcagctgacaaagatgcgagaacattaaccatctctgatacggggatcggaatgacaaaggatgagcttgaacagcatcttggaacaattgcaaaaagcggttccctcgcgtttaaaaaggaaaacgagctgaaagacggacatgacattatcgggcagttcggtgtcggtttttacgcggcatttatggttgccgatgtcgtgacagtcatcagtaaagcgcttggcagcgaagaggcttataaatgggagtctgcgggtgcagacggctatacgattgagccgtgtgaaaaggattctgtcggtacagacattatcctgaaaatcaaagagaacacagaagatgacagctatgacgagtttttagaggaatatcgtttaaaagcgatcatcaagaagtactccgacttcattcgctacccgatcaaaatggatacaaccattaataagccgaaggaaggcagcgaaaatgaatttgaagaggtgcaggaagagcagacggtcaacagcatggtgccgatctggagaaaaaacaaaagcgagctgacagatgaggattatgaaaaattctatgctgaaaagcattacgggtttgataaaccgctgacacacgttcatatcagcgtggatggagcggttcgctacaacgcgattctattcgtccctgaaaacatgccgtttgactactattccaaggaatatgagaaaggcttggagctgtattccaatggcgtgctgatcatgaataagtgcgcagacctgctaccggaccacttcagctttgtgaagggcatggtcgattctgaggatctgtcgctgaatatttccagagaaatgctgcagcatgaccgccagctgaagctgatcgcgaaaaacatcagcaagaaaatcaaaagcgagctgcaaagcctgttgaaaaaagaccgcgagaaatacgagacgttctacaagtcgttcggcagacagctgaaattcggcgtgtacaatgattttggcgcgaataaggatcaattgaaggatctcctcttattctactcttcaaaagagaaaaaactggtcagcttagacgagtatgtttccagaatgccagaggagcagaaattcatttattacgcgaccggtgattcttacgaccgcattgagaaactgccgcaaacggaaatggtggcggacaaaggctatgaaatcctctactttactgaggacatcgatgagtttgcaattaaaatgctggcttcttatcaggaaaaagaattcaagtccgtatcaagcggagaccttggcatagacacggatgaggatcaaaagcagtccgaggaagaggaaagcaagtataaggatctgtttgaggaaatgaaaaacattctgtcagacaaagtgaaaaacgtcagaatctcaaaacggcttaaatcacatccagtctgccttgctgctgacggcgaagtgacaattgagatggaaaaaatcttaaatgcgatgcctgacagccaaaatgtgaaggcggaaaaagtgctggaaatcaacccaaatcacgaggtattccaaacactgcaggacgcgtttgaacaagataaagagaagctgagcctgtacacaaaccttctgtacaatcaggcgctcctcatcgaaggcctgccgattcaggaccctgtggaatttacgaacaatatttgcaaggtcatggtgtaaacagaaaaaggaatcgtctcataaggagacgattcctttttttataatgtacgctcattcagcacttggttttgggtgcttttcttctttttaaaccgttttttcaggcttgcttcaatttcctccaagcttttccctttggtttccggtaccatgtagaacgcgaagaaaaatgagagaagacaaatgactgagaaaaccataaagacccatgcgatgcccatcgcgcttagcatcagcgggaagacaagcgacacgatcaggttagccgccgataacaccaaagtcgtgaaccctgtcgcggctccgcgtgctttggacgggaagagctcaggcatgagcacccacactaccggaccccatgtcgcctggtaaaagacgatatagacaccgagaaagactactgtcatccacgctgttgatgcggaaagccccagtgtcaggagcacgcctgataaagcagcaaggctcagtgtgatgccgacacttccccagatcagaagttttttgcggccgacacggtcaattaagatcatggcagtgatacacatgatgacgttgaggatgccgattcccattgtgccgagcgccgaagctgatgtgccaagaccggccttcgtaaaaatggttggcgcgtagtagatgaccgtgttaatgccgactgcctgctggaaaatggcaaggccgacgccaatcagaagcatagggcgaatccacttggctttcagcacgccaagtgtcgtttcttttttctccgcttccccttgcttcatctctgccaattccatttcgatgtctttggggtcatgagtgatgttcatgatgcgtctcgcttcttcttcgctgccgcgcttcacgagccatcttggcgattccggcatgaaggcgatgccgattaatagaagcacggcaggcactgcagccagaccgaccatccagcgccacgcttcaaacggtgtgaacaggtagttaacgatataggcgagcaaaatcccggtgacaatcattaagttgttcattgtgccgagtgtcccgcgaattttcgtcggtgccatttcggaaagatacacgggcacaagtgccgttgaaccgccgacggccaacccgagtatcaccctagatgcaatcagcatgccgattgtttgagaaaatgcgcaagcgagcgcaccgataataaaaatgatggaaaggacaaatacaacctttctcctgccccagcggtctgagcatgtgccgctcaaggcagaaccgaaaatcgcgccaaggagcagcatgctgacaaccaatccttctgtcaatgtcgttaaaggaatatcgttattgataaacaggagtgctccggagataacacctgtatcgtaaccatatagcagtccccctaaagcgccgaaaaagtagatcatatatttccttgtgtctttcttcacaaatgtctcctcctcagttgttgagccaatgagtatctaaaaatatgtaacaaagttaatagattagtacccatttcctatctcatttgaaacatttgttttgaaaaaacggaaactttatagccaaaagagatgatcacagatccgctgagtttaggaaaaacgaaataactttatgctcagagaaaccattaaaaaaaccttacccgcgcggagtaaggtttgattaagacatttttattcttctgcttcgttgacaaaaaccaaggcggagaagccttttttcttatcaaattgcaattcaacgacggtaacgtccggattgaagttgtggtattcctctaagaactgaataatgccttctgaaatgtcatctgacataagctgcttgtggtgcaggccaaatgtagcttcagcgaagaaccctgtacgcttgttgtacgatagttcttttacttcaacgtcttcagggtagatatcttcttcattggaaatatacacgcaaattccgtctacaatttcttgctcatttaatattaatctcattgcctaaaatctccttctgtacgtcttcggtgctttaaatgcgcgaatcaatgcgatgacaatgattaaaataataatcaaagcgatgatatcaacgatccaggcaatgggtgaagcgccataagaaacataaccggggcctccgactggatgataggtgtaaccccatgggtgcatcatgctgatcatgaacatacccattgtaaatccgctataatatccaaaccatcctgatggcgcgaaacctgcgtgatagtaatgattgactgaaacataacgtccgccaacataggctttagacgtttttccgctgtatgtctttccggttacttttgatgtagcgccggaaaaggtgcctgacgattttttagagcttgatgaacttgccttttccgaaggcttctttttaagcgaaatcgatgatgatgaatcgtcagacgtcttggattttttgctagaagagcttgatcctgagctgtagcttgatttcgggcttgatttatagcttccgctgtatgatgagcttgaacttcggctgctgtaactagatgatgagcggccgctaaagctctttgcatgagaaatcgttgatggcagcagtacacctaaagcaacggttactgcaactaaggcttttacatatttaagtttcattctgtttcctccatagaccatcgaaacggtccgctattctgaccagcaaataaaagaagctgggtcagctttatttcatatgagctagatgatatgaacgtttcatacttttgctttctcaatcactttctttctgagataaactacctttattttatcggatttatggctcattttgtaaggttttgcttcaaaatcagttatttaggaatttatcgcacaaaaaaacagccttctccattggagaaggctgttttcttcttatgcgaacagcttatcaataaatgaaatatcctcttgagaaagcgtcacgtcagctgttttgatgttatcaatcagctgatcggcacgttttgctcctgggattaaaatatcaatttccggtcttgctaaataccaggccaatacgatgtgagggatatccacgttgtgtttttcggcaatcggcgcaagcttgttgacctttctgatattttctttgaaacgctcacccttgaagtgttcctgttcgtttcgcaggtcgccttctgggaacgttgtatcttctgtatactttcctgccaataaacctgatacgagagggaagtaagggataaatgaaatattatgctccttcgtatacgggaagaatgttttttccgcttcacggtttaacaggttgtattcgccttgcaatacatctaccaaaccgtctttgtttgcttctttcaattgctctaaagagaagttggatacaccgatggaacggatttttccggctttcttcatctcattcagcgcgttaacggcttcatccttaggcgtatgttcgtcagggaagtgaatgtagaacaaatcaatataatcggtattcaagcgcttcaggctttcatcaactgattttttaagaaaatctggtgaattatcaaagacaaagtcattgccttgttttctgtgagcggcttttgtcgcgatgacaacatcttcacggttgaattcacgcagcacttcaccaattaattcttcggaacggccgatcccgtaaatgtaagcggtgtctaacattgtcacgccattacggatcgcctcgcgcaccaattcttttccggtttcttcatttaggttcgggtagaggttatgtcctccgacagcatttgttcctaatccgatagggaatacctgcaagtctgattttccgagcttcgcttttttcatgatctgcctcctagaataaaatggatgatagactctcaacactattgtaaacgttaggccagatgaatgccgatttgatgctcattgcagtactgcgtgtactcgtcgtctaatggctgagaggtcacaatgcaatgcagcctgtcaaacggtgcatacgtcagaagcgttgattttccgaatttagaatggtcagccaatagatacacttcttttgctttttctgaaatcctctttttaatttcatactccagcagatccgaattggtcaatccgtgagtcagcgtcgttccggtagcggacataaaggctttgttgatattgtacttatcaagcatagccgggtcgtccatgccgacaaaggagcgggtttttctcttatagttgtttccgataatgattaagttgatattcttcaaagctgacgccgcattgataatgtctaaactgttggttaagatggtgacatttttggctggatcaagcgtatcaagaatagactttgtcgtcgttcctgaatcaatgaagaccaaatcgtgatcttcaataaatcgggaagcataatgggcgatttttgttttttcatcctggtgctgaatggtgcgattttcaaaaggaactaatgcggttttttcaatagatgttacgccgccgtatactttttcaatcgcacccttttctgttagcttgttgatatcacgtctgactgtgtttttggagacattgaacacctggcacagctcatctaaggaaacagtgccatgcgataaaatgtactcctccatttcctgaatccgcatcagtttcatataaaaaactccttcttgaatctttacgtaacataaatatataataaaaaccaaaagttaatcaatagttgcttaaaaatgataacatcggtgtatatcttttgcaagattggacggccttctcttacttctcttacttgattaaaagattaatataataaaaataatgaaaaaatgtagtgtttatgattgacttatgggtattatgcgattagaatataaccaagaaatgaccaaaaagtaacctgttgtgcatgaaatggttgcttgtatgtaaatatgcatccgccatttatttttttggtgtttttgaaagcgtttaattcttggcttgctgaaaagtggatattgatatgaatctatccggaaccatccatacaagtgtatgtgtttactaatgaaggaggcaataagaatggcagaaatcagaaaattaaaaaactacatcaacggtgaatgggttgaaagcaaaacagatcaatatgaagatgtcgtcaatccggcgacgaaagaagtgctatgccaagtgccgatttctacaaaagaggatattgattacgcagcgcaaacagcggctgaagcatttaaaacatggtcaaaggtggcggttcctcgccgcgccagaattctatttaacttccagcagctgctgtctcagcataaagaagaacttgctcatctaattaccattgaaaacggaaaaaacacgaaagaagctttaggtgaagtgggacgcgggattgaaaacgtagagttcgccgctggagcaccttccctgatgatgggtgactcacttgcttccatcgcaacggacgttgaagcggcgaactaccgttacccaatcggagttgtcggcggaatcgcgccattcaacttcccgatgatggttccttgctggatgttcccgatggcgatcgcgctcggcaacacatttattttaaagccatctgagcggactccgctgttaacagagaaattggttgagctttttgaaaaagcgggccttccgaaaggggtgttcaacgtcgtatacggtgcgcatgacgttgtgaacggcatcctcgagcatcccgaaattaaagcgatttcatttgtaggctccaagccagtaggcgaatacgtctacaaaaaaggaagcgaaaacttaaaacgcgttcaatctctgactggcgcgaaaaaccatacgattgtcttgaacgatgcgaatcttgaagacacggttacaaacatcgttggagctgccttcggttctgccggtgaacgctgcatggcttgtgcggttgtgacagttgaagaaggaatcgccgatgaatttatggcgaagctgcaggaaaaagtggcggacattaaaatcggtaacggccttgatgacggcgtgttcttaggaccggtgattcgcgaagacaacaagaagcgcacgctcagctatatcgaaaaaggtcttgaagaaggtgccagactcgtatgtgacggacgtgaaaatgtgtctgacgacggctactttgtcggcccgacgatctttgacaatgtcacaacagaaatgacgatctggaaagatgaaattttcgctccggtcttatctgtcatccgtgtgaaaaacctgaaagaagcgattgaaatcgccaataagtctgagtttgcgaacggcgcctgcttgttcacatccaactcaaacgcaatccgctacttccgtgaaaacattgatgcgggaatgctaggcatcaaccttggtgtgccggctccaatggcgttcttcccattctcaggctggaaatcttcattctttggaacgctgcatgcgaacggaaaagacagcgtcgacttctatacacgtaaaaaagtggtgacggcaagatatccggcacctgatttcaactaaacgacgaacagccgaacggcgtccatgtgcgctgttcggactcattctgccaatagaaagaggagggcttctctatgagttatttgttgcgtaagccgcagtcgcatgaagtgtctaatggggtcaaactcgtgcacgaagtaacgacatccaactctgatctcacttatgtagagtttaaagtgttagatcttgcatcaggttcaagctatacagaagaattgaaaaaacaagaaatctgtattgtggcggtaacggggaaaattacagtgacagatcatgagtcgacttttgagaatatcggcacgcgcgaaagcgtatttgaacgaaaaccgacagacagcgtctatatttcaaatgaccgtgcatttgagatcacagcggtcagcgacgcaagagtggcgctttgctattctccatcggaaaagcagcttccgacaaagctgatcaaagcggaagacaacggaattgagcatcgcgggcaattttcaaacaaacgtactgttcataacattcttccggattcagacccttcagctaacagtctattagtagttgaagtctatacagacagcggcaactggtccagctacccgcctcacaaacatgaccaagacaacttgccggaagaatctttcttagaagaaacgtactaccatgagttagacccgggacagggctttgtgtttcagcgcgtatacacagatgaccgttctattgacgagacaatgactgtgggaaatgaaaacgttgtcatcgttcctgcgggataccacccggtaggcgttccggacggatacacatcctactatttaaatgtcatggcagggccgacgcgaaaatggaagttttataacgacccggcgcatgaatggattttagaacgctaacaagtgaggagtggctgtttacgatgaagtatacattcaatgaagagaaggcttttgatattgttgccatcggccgggcatgtattgatctgaacgcagtcgaatacaaccgcccaatggaagaaacgatgacattttcgaaatatgtcggcggttcacctgcgaatatcgcgatcggcagcgcgaagcttggcttaaaagcgggcttcatcggcaaaattccggatgaccagcatggaagattcatagagtcctatatgagaaagaccggcgtggatactacacagatgattgttgatcaagatggacacaaagcaggccttgcatttacagaaatcctcagccctgaagaatgcagcatcttaatgtatcgcgatgatgtggcggatctttatcttgagccttcagaggtaagtgaggactatatcgcaaatgcgaaaatgctgcttgtctccgggacagcgctcgccaaaagcccgtcacgggaagcggtgttaaaagctgttcaatacgcgaaaaagcatcaggttaaggtggtattcgaactggattaccggccatatacgtggcagtcatcagatgaaacagccgtttattattctttggttgccgagcagtctgatatcgtcatcggcacacgcgatgaatttgatgtgatggaaaaccgcacaggcggaagcaatgaagaatccgtcaatcatttatttggccattcagccgacctcgttgtcatcaaacacggcgtcgaaggctcttacgcatacagcaaatccggcgaggtattccgcgctcaagcgtacaagacaaaagtgctgaaaacctttggggccggtgactcctatgcgtcagcctttatctatggccttgtcagcggaaaagacattgaaacggcattgaaatacggcagtgcttcagcctccattgtggtgagcaagcacagttcgtcagaagcgatgccgactgcggaagaaatcgaacagcttattgaagcacagtcataattgaaaaagatcgagtaaaggtgggatcgtttgtgggtaagaaaattcgcttaacaactgcgcaggcgctgattaaattcttaaaccagcagtacatccatgtagatggaaaggaagagccttttgtcgaagggatcttcacgattttcggtcatggaaacgtattagggatcgggcaggcgcttgagcaggatgcaggccatttgaaagtctatcaagggaaaaatgaacaaggaatggcgcatgcggccatggcgtacagcaagcaaatgctgagaagaaaaatatatgcggtgtctacatccgtcggacctggagcggctaacttggtggcggcagccggcactgcattggcaaataatatcccagttctcttgattccggcagacacatttgcgacaagacagccagaccctgtactgcagcaaatggagcaagaatacagtgcggcgattacgacaaacgatgcattgaagcctgtatcgagatactgggaccgcattacgcgccctgagcagctgatgagcagtttgctgcgcgcgtttgaagtcatgactgatccggcaaaagcaggtccggcaacgatttgtatttctcaggatgttgaaggggaagcatacgattttgatgaaagtttcttcgtcaaacgggttcactatattgatcgcatgcagccgagcgagcgcgagcttcaaggtgcggcggagctgattaaatccagcaaaaaacctgtgattctcgtcggcggaggcgcaaaatattccggtgcgcgcgatgaattggttgccatttctgaagcctataacattccgttagttgaaacgcaggcaggaaagtctaccgttgaggcagattttgcgaacaaccttggcggaatgggcatcacaggtacacttgcggcaaacaaagcggcccgccaagctgatttgattatcggcatcggcacaaggtatacagattttgcgacatcctctaagaccgcttttgattttgataaagcgaagtttttgaacattaacgtcagccgaatgcaggcgtataaacttgatgcattccaagtggtggcggatgcgaaagtgacgcttggcaaactgcacggcttgcttgaaggctatgagagcgagttcggcacaacgatccgggagctgaaggacgaatggctagctgaacgcgagcgtctcagcaaagtgacgtttaagcgggaagcatttgatccggaaatcaaaaatcacttttctcaagaggtcctgaatgaatatgctgacgcgttgaatacggagcttccgcaaacaacggcattgctgacaatcaacgagacgattcctgaagacagcgtcatcatctgttcagcaggctcactcccaggagatttgcagcgtctgtggcattctaatgttccgaatacgtatcacctggagtatggatattcttgcatgggctatgaagtgtccgggacactcggtcttaaactggcccaccctgacagagaagtgtattcaatcgtcggagacggcagcttcctgatgcttcattctgaactgatcacggcgattcagtacaacaagaaaatcaatgtgctgctctttgacaactcaggattcggatgcatcaacaacctgcaaatggatcacggcagcggcagctactattgcgagttccgcacagatgacaaccaaatcctgaatgtcgattacgcgaaagtcgctgagggatacggcgcgaaaacctaccgtgcaaacacagtagaagaattaaaagctgcgttagaggatgcgaagaaacaggatgtatcaacattaattgaaatgaaggtgctgcctaaaacaatgacggacggctatgacagctggtggcatgtcggggtggcagaggtatctgaacaagaaagcgttcagaaagcatacgaagcaaaagagaaaaagctggaatctgcgaagcagtattagaggggaggcaccatagatgggcaaaaatgaaatcctgtggggaatcgctcccattgggtggcggaatgatgacatgcctgaaattggagcgggaaatacacttcagcatttgttaagtgatatcgttgtcgcacgttttcaaggcacggaggtcgggggctttttccccgaacctgccatcctgaacaaagagctgaagcttcggaacttacgcattgcaggaaaatggttcagcagttttattttgcgtgacggacttggtgaagcggcaaagacatttaccctgcaatgtgagtatttgcagcaagtaaacgcggatgtcgcagttgtctctgaacaaacgtacagcgtgcaaagcttggagaaaaatgtgttcacagagaagccgcactttacggatgatgaatgggagcggctttgcgaagggctgaatcaccttggcgaaattgccgctcagcatggcttgaagcttgtctatcatcatcatctcggcactggtgtccaaacagcggaagaagtggaccgcctgatggcaggaacagaccctgcgcatgtacacctcctctatgatacaggccatgcgtatatttctgacggcgattacatggggatgcttgagaagcatatcggccgcattaagcatgtgcactttaaggatgcccgcctgaatgtcatggaacaatgcaggctcgaaggacaatcgttccggcaatcatttttaaaaggcatgtttacggttcccggtgacggctgcattgactttagagaagtatatcagctgctgttgaagcacagttattccggatggattgtcattgaagctgaacaagaccccgatgttgcaaacccgctggagtatgcattgattgcgagaaactatattgatcagcagttgttggatctggcttaatggggaatgaacatatgggcaataccaatggagattcagccttcaataaacggacaatcgcggcagcattggccaactatattgatgccggttcaattgtggcaggctccgccggtttatcattatgggtcagttaccttaagctatccgatacgcaaatcgggctgctcggcgcgttgagcgcaaatgcgatttctgccgctgtcggcgcgctgcttggcgggtttctggctgataaagtcggacggaaggctgtttataccaatagtatgctggtttatgcactagggatttgtttggttttgttcggggttaatttccccatgttgttaagcggttacatcattatcggtttatcagtaggggctgacataaccgcgtcatggaccattattgcggaaaatgcgccaaagaagaatcgggccaggcattgcggcgtagcacaagtcgcttgggccgcgggcgctgtcgttgtactgctcctctccgtactggccggtgacttgggactcttggggaataaaatcgtatttgcccatctgcttgtgattgcgctgattacgtacatcctgagaatcaggcttccggaatcagacgcctggcagacaaaaaatcagccggaggaagctcaggcagagaagccggctgtattgaataagacatcgtattttgatttgctcaagcctatgtatctaaaaagcatcctgtttttgatgggtgtgtacttggtttggaacctagccgccggggtcatgggcttctttatgccatacatttatcagcaggtcggcggtgtatctgccaacatggccaaccttttgcaaatggggctgtttatcttcacaggattgggggtcgccttgatcttcatgccctttgccgacaaatatagaaaaaccgtatttggaatcgccgctttcatggcggtgatcgggtggacactgtttctgctgccagttgaaggcctgccgattctgctcctgtttattgtcgtgatcggcatcaataacggagccgggcagcaagcgaactatcagttatgggccagcgaaatctttcctacgcaatatcgtgcttccgcacaaggactgatgtttttccttgtccgtatttcaatagggatttggagtctgtttgtcccaatgattatcaccaatttcggcattggaacgatggctgcaattcttctcggatgtgtgacggccagtatgatcatcgggctgctctttgcgccgaatacgtctggcaagtcgcttgaacaaattcaagaggaactctacgggtctcctcagagccaagtaaagaaaggaacagaaagcaaaatcatgtaaccaacagaaggagtggctgtcaatgagtttacgtattggcgtaattggaactggagcaatcggaaaagaacatattaaccgtatcacgaacaagctgtcaggcgcggaaattgtagctgtaacggatgttaatcaagaagctgcacaaaaggtcgttgagcaataccaattaaacgcgacggtttatccgaatgatgacagcttgcttgcagacgaaaatgtagacgctgttttagtgacaagctgggggcctgcgcatgagtcaagcgtgctgaaagcgattaaagcccagaaatatgtgttctgtgaaaaaccgctcgcgacaacggctgaaggatgcatgcgcattgtcgaagaagaaatcaaagtgggcaaacgccttgttcaagtcggcttcatgcgccgttatgacagcggttacgtacagctgaaagaagcgctcgataatcatgtcatcggcgagcctcttatgattcactgcgcgcaccgcaacccgactgtaggagataactatacaacggatatggctgtagtcgacacgcttgttcatgaaattgacgtgctccactggctcgtcaatgatgactacgagtccgttcaagtcatctatccgaaaaaatcaaaaaacgcgcttccacatttaaaagatccgcaaatcgtcgtgattgaaacaaaaggcggtatcgtcatcaatgctgaaatctatgtgaactgtaaatacggctatgacattcaatgtgaaatcgtcggagaagacggcatcatcaagcttcccgagccatcaagcatcagcttgagaaaagaaggcagattcagcactgatattttgatggattggcagagacgctttgtcgctgcgtatgatgtggaaatccaagactttattgattcgattcaaaagaaaggcgaggtcagcggaccgacggcatgggacggctatattgctgctgtcacgactgacgcgtgtgtaaaagcccaggaatctggacaaaaagaaaaggttgaattgaaggaaaaaccggaattctatcaatcttttacaacagttcaaaactaaaaaacagaggagtgaaaatatgaagttagcattggatccatccatgtatcgtgatgatttaactttagaggaaatggtctataaaacggcagagctcggctatgaatatatcgaattatcgccgcgcgaggatttttgcccgttttataaatatccgaaagtcgattcagcaaagatcaaacaattaaagcgccttttaagagatacaggtgttaagctttcatcgcttcttcctctttaccactgggcgggacccgatgaagaccgccgccaggcagcagtgcgcaactggaaacgggcaatcgaaattgcggttgaacttgaagtggatttgatgaacagcgaattcagcggttcaaaatatgatcctttaacaagtgaagaaaaatttatcaaatccatggatgagcttctgccagtctttgaaaaagaaggcattaaactcaatcttcaagcccatccatatgattttatcgaaacgcacaaaggtgcgatggatatgatccgcgcgcttgacaaggattggatcaatcttgtctactcgactgcgcatacgttcttctatgatgacggcaaaggcgacatcgagaccatgtttgacgaagccggcgaccgcctcacacatgttttatttgcagatacctataatcataaagcggctcatggccttcgctacatcgtcaatccgcctgacgcgaaagtaacggttcaccagcatttggacattggccaaggcgaggttgattttgatacgattttcagaaaactgagagagatgaagttcgacggaattgcgacgaatgccgtatttgcttgggtcgatgaaagagcggatgaatcaagccgatttatgcttaagaaaatgaaagaagaattaggtctggcataagctgagcatggagttcggcgggatatggcgacagccttcctgccgaactcccttcatatctaaaacgcagatgggggagtctggcatgaaactttgttttaatgaagcgacaacattggaaaactcaaaccttaaactggatttagaactatgcgaaaagcatggctatgattatattgaaatccgtactatggataagctgccggagtacttaaaagatcattcattggatgaccttgcggaatattttcaaacccaccacatcaaaccgcttgccttaaacgcactcgttttcttcaacaaccgtgatgaaaagggtcacaacgagatcatcactgaatttaaaggcatgatggaaacatgcaaaaccctcggtgtgaaatatgtggtggccgttccgcttgtgacagagcagaagattgtaaaagaagagatcaaaaagagcagtgtagacgtgctgactgagctgtcagatatcgcggagccgtacggcgtaaaaatcgcgcttgagtttgtcggccatccgcaatgtacggtcaatacgtttgaacaggcgtatgagattgtaaacacagttaaccgtgacaatgtcgggcttgtccttgacagttttcacttccatgcaatgggttcaaatattgagagcttaaagcaggcggacggaaagaaaatcttcatctatcatattgatgatacagaagatttcccaatcggctttttaacagatgaggatcgtgtatggccgggacaaggggcaattgacttagatgcccacttatcagcactgaaggaaatcggcttctctgatgttgtttcggttgagctcttccggcctgaatactataagctgactgctgaggaagccattcaaacagcgaaaaaaacaacagtggatgtcgtatcaaaatacttcagcatgtaatggataaaggaggggtgaatatggcttttgtatcgatgaaagagcttcttgaagatgcaaagcgggagcaatatgcaattggccagtttaatatcaacggcctgcaatggacgaaggcgattttgcaggcggcgcaaaaggagcaatcaccggtcatcgccgcggcttccgatcgcctggtcgactatttaggcggatttaaaacgattgccgccatggtcggcgcgttaatagaggacatggcgattaccgttccggtcgtgcttcatctcgatcacggcagcagtgcggaacgctgcagacaggccattgatgccggattcagctcagtgatgattgacggctcccatcagccgattgacgagaatatcgcgatgacaaaagaagtcaccgattatgccgcaaaacacggcgtgtcagtagaagccgaagtcggcacggtcggcggaatggaagacggactggtcggcggggtccgctatgcggatatcacggaatgtgagcggatcgttaaagaaaccaatatcgacgcgctggccgccgccctcggctctgtacacggcaaatatcagggtgagccgaatctcggatttaaggaaatggaggctatctcccgcatgactgatattcccctcgttcttcacggggcatccgggattccgcaggatcagatcaaaaaagccatcacgctcggccacgcgaagatcaatatcaatacggaatgtatggtagcgtggacagacgaaacacgccgcatgtttcaggaaaacagcgatctgtacgaaccgcgcggctatttgacacccggcattgaagccgtggaagagacagtgcgaagcaaaatgagagagttcggatcagccggtaaagcagctaagcagcaggtcggctaaagagaccagaaaccgccgagatggcggtttttttgtgcggtgttgcgtccatacgcccaaaacgattatgatgatggcagcagtgtaagaaacgggagtggttcagtttgaataaaatcatgattgtggaagacagtgaagacattcgcggactattgcagaattaccttgaaaaatacggatatcaaacagtggtcgccgcggattttacagctgttcttgatgtctttttgcgggaaaagcccgatgtggtgctgcttgatatcaatttgccggcatatgacggatattattggtgccggcagatccgccagcactccacaagcccgatcatctttatttctgccagaagcggggaaatggatcaggtgatggcgattgaaaatgggggagacgattatatcgaaaaaccgttttcttatgatattgtgcttgcgaaaatcaaaagccagatccggagggcgtacggggagtacgccgcaaagcagggagagaaagtggttgaatatgccggcgttcagctctttgtggaacggtttgaactgcgttttcaggatgaaaaaagtgagctttctaaaaaagaaagcaagcttttggaagtgctgcttgagcggggagaaaaggtgacgagtcgggaccgtctcatggaaaagacgtgggacaccgacatattcatcgatgataatacacttaacgtgtatatcacgcggctcagaaaaaaactgcgggagctgaatgcgcctgtttctattgaagcggtgcggggcgaaggctaccagctgagggcgcagtcatgaagctgtttctccggtctcatgcagtgctgattctgctttttctccttcaagggctgtttgtcttcttttattactggtttgcgggtcttcattctttttctcacttgttttacatattgggcgtgcagcttcttattttggcgggctatcttgcctatcgctggtacaaagaccgcggcgtgtatcattggctcagctcggggcaggaagggacggatatcccgtatctcggttcttcagtgttctgttcagagctgtatgaaaagcagatggagctgatccggctgcagcaccagaagctccatgagaccgaagccaagcttgacgcgcgggtgacgtatatgaatcaatgggtgcaccaagtaaagacgccgctgtcggtcattaatttaatcattcaagaagaggatgagcccgtttttgaacaaatcaaaaaagaagtccggcagattgaattcgggctggagacgcttctttattcttcaaggctcgacctgtttgaacgggattttaaaatcgaagcggtttccctgtccgagcttctccaatcagttattcaaagctataaacgattttttattcaatatcgcgtttatccgaaaatgaacgtttgcgatgatcatcagatttacaccgatgccaaatggctcaaatttgcgattggccaagtggtcacaaatgcggtcaagtattcagcgggcaagagtgacagacttgagctgaatgtcttctgcgatgaagacaggacggtgcttgaagtcaaagattacggtgtcgggattccctcacaagacatcaagcgggtgtttgacccttattacacgggtgaaaacgggcggcgtttccaagaatctacgggaatcggcctccatctcgtcaaagaaattacagataagctcaatcatacggtggacatcagctcgtctcccggtgaagggacatcagttcgattttcatttcttacaaaaatgtaaggctgcgttaagaaaacaacatagcccgctttgtttccccttgataacatggatttatgtcaaggggatttttatgttgaacgtcccggcactacatgaaagcagcccagatcaacaagaataaaaccataaggaggattttcatggcgaatatgcttgaagtcaaacatataaataaaacctataaaggacaagtgtcctatcaggccttaaagcaaatttcattttcaatagaagaaggcgagttcacggcggtgatggggccgtccgggtccggaaaaacaacgcttttgaatatcatttcaacgattgaccgtccagattcaggcgatatcctgattaacggagaaaacccgcatcgcctgaagcggacaaagctcgctcatttccgccgcaagcagctcggatttgtgtttcaggatttcaaccttctggatacgctgacgatcggtgaaaatatcatgctgccgttaacgcttgaaaaagaagcgccgtctgtaatggaagaaaaactgcacggcatcgcggcaaagctcggtatcgaaaacctgcttaacaagcggacgtttgaagtatccggaggccagcgccagcgggccgccatcgcaagagcggtcattcataagccgtcactcattctggccgatgaaccaactggaaaccttgattccaaagcgacaaaagacgtcatggaaacgttgcagagcctgaatcgggatgatcatgtcacggctttgatggtgacccacgatccggtttcggcaagctactgccgccgcgtcatctttataaaagacggcgaactgtttaatgagatttaccgcggggaaaaccgccaagtattttatgaacaaattctcgatgtgctgtctatgctggggggaaacgcaaatgacctttcttcagttcgcttataaaaacgtcacgagaaacaaaagggcctatcttgcattctttttaagcagcgccttttccgttttgattttctttacctttgcgatgttcctgtttcatccggcattaaaggaaggctacctgaataacatcgccaaaaaaggcttaaccgccgcggaatggatgatctttgttttttctttcttatttgttctgtattcggttaatgcatttttgaaatcgagaaataaagaattcggcattctgctcatgcagggcatcacgccggggcagctgagaaagctcattactgcggaaaatatgatcatcggcgtcatgtcaattgcagccggtattatcggaggattcattttttcaaagacgttctttacggtcggcgcttatattttagaaatggacgcgctgcctttgtatatgccttggaaagcgctcggtattacggcctgcggatttctgctcttatttttctttttatcgcagtttacgatcctttttgtcagatcaaatacggttatcaaattaataaagggcactggcaaggttaaaccggagcctaagccgtccgtgcttctgtccttattcggcatcgcctgtctgtgcggcgggtacggcatggttcttaaaggcaatgtccacggggccgaaccgtttatcattttactgctcaccgttatcggaacatatttctttttcagccaaagcagcatatggattctgcgcgcgctgaagaagtggaaaaccttttatctgcgcgggaaaaacatcatttgggtttctgaccttgtctatcgtctaaaagacaacgcccgcctgttctttattgtcagcattatttccgcggttgcgtttactgcgacaggcgtgctcgcaatgtacaaatcgaccgtcggagcggaagagtccgcttatgaaatggagtatttatcttacagcaacaatccaaaagaacagactcatttgaaagatattgaccatgaactgaaaacacacggttttacgtatacgaaagacaaaatagatgtttcctatgttcgctatcaggaaggagaaactgttccccctgtttacatgatcagtgaatcggatgcggcaaaatacttccatgtcaaagtgaacggcctgaaagaagacgaggctgtctatttcccgggaacgtatgaccgcaatttcaaaaacgaagcgccggatcagctgaagctgctgaaccaaaaaggggagctgtctgatcaaaaactgtcggtaaaagaagtcaaaaaaccgctgatctcattgaatgctatcatcgcggtgaatgatcaaacctttgatcagctgaaatcactcggtgataaagcgtcattatacggctacagctatgatcattggaaagacagtcttgagatcagccaatccttgcaaaatgagatttacggcaattatatcgacgtgcattctgattttgcttcaaaagcggggacttactatgatacggtgcagctgccgagcctgagtctatttatcggcctgtttatcgcaattgtattctttgtcgcggcagcaagtttcttatatttcaggctgttcactgatttagatgaagaccgggagcgctaccgttcactggccaaaatcggcctgagtgagcgagaaatggcgcaaagcgtgacaatacaattggcgattcttttcttctttccatttgtcattgccgtcatgcatacactgtttgccttgagaacattggctgtggaaggatattccgatgtagcggggccgctcagtctcaccatcggagggtttttcatttttcagcttctattcttcctcgcggtgcggtcaagctatttgaaaaaaatgaacaagtaaggggagtgcaaagatgaaaaaagcaatggcaatcctggccgtcttggcggctgctgccgtaatatgcgggcttctcttttttcataacgatgttacagacagatttaatccgtttattcaccagcaagatgtctatgttcagattgatcgagatggcagacatcttagtccgggcggtactgaatatacattagacggatataatgcatccgggaaaaaagaagaagtgacctttttcgccggcaaagagcttcggaagaacgcgtatttgaaggtgaaggcgaaaggaaagtatgtcgagacttgggaagaagtcaagtttgaagatatgccggactccgtacagtcaaaattaaagtgaatcataaaaaacggcacagcgtcatgactgtgccgtttttttattttttattttcttcggcccgtttgatcagcatgtcggtgatgatatccacctgtttgctgacagaaatcgggtcgtacgggtagaacgagtcaaagtcattgataaacacgcgattatgtttaacagcgtcaagatttttccaaatggaggaattctccagcttgtcgagtgttttgctttcgcctttcgggttgtaatccgtaatgaacatataatctgcggcatactcaggaataacctcttgagagagctgtttcatctctccttttttgatgacatcttgctcaattttttcaggcgcttttaacccaagtgcattgtatacagcttggccgccgcgtccgccattgtcattgaacacccagaattcgcccttgtctgtgttttcataaatgccgaaggttgcatctttgtcgatgacgccggcaattttcttcttagctgcttccgcttttttgttaaagtcagccataaaggattttgcttggtctttcgctccggcgatatctccgaacatgctgactgtgtcttctacgtttttcgctgtgttataaggtatgacaacagtcggagcgattttctttaatttatcaacattctcttcattcatgacaacaattaagtcaggctgaagctccatcactttttcaacgcttattggatcaccaacatccttcacatttttcagctttgattttaaaaacggattatcaaatgaccatgagcctgagccgaccacattggccccgacagacagcaattcaccggcataaaaatcagtgacgatgcgtttcggatgtgcaggaatgttgacgttcccttttggtgatttgtatgttctcatttctgttttttcggaagcagaatcgcttgagctccctttagaagccgtgccgctgcaagcgctgacaaacatgagaagcagcacaagcatgcccacgagcaatatgttctttttcatcaagaaccctcccactatgtatctcaatagattagtaatgattatcattatcaattaataatatagcaagaaacctgttctccgtctatcactatttttaagggagaaagtttttcccgtttatgggtgacgcggtgtgcctaatcgattattataggtaaataggaggagaaaaatatgggaattacaaaaagaggtgccgcttgggaatggctgcatagctggtggatgctgtttattttcatgccttttgccattaccagtttttttgcctttttatttattggcatcaaggttagaaatagaaagtggatcatgtacggcatcatttattttttcatttttgcgtttggttttgttttgcccgatctgcccggtgtttttattgtggtcccgttatgggcggtaaccattattcatggatttaaagtgcgcccgctgtatttgattcagctggatgtctacaaagatcatgtggaggcgcgggcttttgccgaggcaagaagtgaagccgagagcagatttcatgcaccgaaacagtctattcaggatatacatattcgcaaagaacagtaagaaaaaaagctcaacactcgcattgtgttgagctttttatatgttactgctggtaggattgctgctgaaatgtcgtgttttggccgaatggaagtgtagacacattcgtattcatgacgctggattgtccagtaagttcctgttgcatttggttgcacatgttgacaacctgctggcacttttgaatcgccatgtcatgcccgtgcagtgcttgctgaatggtatgtgcagcttgttgttcgtggtttagaatctgctgcagcatttggatgttttgctgttcctgatgaagcatttggcgatattgctggctcctttgctgtgtttgctgaatgagctgctgagcagtttggcggcattggttcagctgctgcaagccgtgttgtgtattatgcatgaatgatccctccatgtatcgattgacgtgagtcggtattatcatgcaacttgaatgaaaagaaattccgtcaaagaggaactacaattattttcctcagcccctctatctttgaatgaaaacggtaaagattgtatactgggtacaaaccctttttatgtaaatgttccgttttaacatataagaaatgcggaaaacgaaaccctgagatgggagaatcgtattccgctttttttctttgtttcgctcagaaaccgccttcccctgcagtaaatgggatattcagccggttttctactgtacggaggcgctgattgagccgatttaggcggcgtgtatggcgttcaacagcctggcttaactgattgacctgttcggcaatccgtgcaatttcccgattttgacggcggtcttcgtttgtcagacgggttaattctcttgactgctgttcattttgccgttcaagtgctgcgattcttctttccaatgccggctgtctgtccatttggtatggatcgtatacatcctgctgcggataaggattgtactcatagtggctatagtaaggttcctgctgaggcagctgagggctgtaatattgataagggttcatgtgatcagtctccttgtgggtgaattccttataacttatgtagtcattggcacagtggcacggcattcgcccaaaaaaggaggaaagaatggtgatccccttgagaaacaaatatggcattttgtttttaattgctgtatgcatcatggtatcgggctgccagcagcaaaaagaagagacgccgttttattacggaacgtgggatgaggggcgtgcccccgggccaacggacggtgtgaaatcagcaacagtcacatttaccgaagacgaggttgtggaaacggaagtgatggaaggaagaggagaggtacagctgccttttatggcatacaaggtgatttcccaaagcactgacgggtctatcgagattcagtacctcggcccttattatccgctcaaaagcacgctgaaaagaggagaaaacgggacattgatatgggagcaaaatggacagagaaaaacgatgacaagaatcgaatcaaagaccggcagggaggagaaagatgagaaatcaaaaagctgaaagactggtggcagcggggcttgttttacatatcattcaatggatatttatattatgggcttttctcaaagtcaaacatttatttagtgactatacgatctataaccctaatgtcatcagcggctccatgcagtccttatcgtttatacaaatgatgcgcgctatgatgtactcaggggcaatcgtgaattatgttttgttttttgcccttgtattgctgatttatggcatagtgcttcatgccatcctgatcgttctggaaatggcggcttacgtcatgatcagacggaatccatcatcttcatgggggttctttttcatcgcggcgggtgtgaagcttgccatcttgaatataaccggcattccttttctagctgccggctttctgctgatgaaacagaaaaaagcagaaaacggcgtcaaggcagaaagaaagcggaaaccgcgcttgcgtatccgaagacaagggcggcgtctaaacagaatccggagaaaaccatctcttccggttgaatatcaaaaagaaaaaacgatatgatgggactatagcctgaaaacgacatgaaggagatgcaggatgtacaaactaattgcaattgatatggatggaacacttttaaatgatcatcatgaagtaacagaggaggtccgcgacgcccttcacgcggcaaaagcggaaggtgtcaaaattgtgctttgcaccggccggcctatcgggggtgtgcagagatatttagatgaactgaatttaattgaagaaggcgactatgttattgcgtataatggagcacttgttcaaaatacgcatacaaatgaagtggtctcagagctgtctctcggttatgatgatttgacttcattatatgacctgagcttagagctgaagacgccgatgcatttctttgactcatctaatttgtatacgcctaaccgggatattagcgaatttaccgtatacgaatcctatgtgacacaggtgccgcttcatttccgcaagattgacgaggtgccaaaagatatcctcatcccgaaagtgatgtttattgataaaccggagaacttaagccgcgtcattacatcgattccaaaagacgtgagagaaaaatatacaatggtcagaagcgcgcctttcttttatgaaattctgcactcggaagccagcaaaggaaatgctgtacgccagctggctcagctgcttggaattgaacaggcggaagtcatgtgcataggcgacaacgggaacgacctgacaatgatcgaatgggcgggctgcggggttgccatggcaaacgccatcccagaagtattggaagcagcaaactttcaaacacgctccaataatgaacatggcgttgcacatgcgattcacgagcttgttttggctaaataataaaaaatccagccttctaaaggctggattttttcgttttatttgatgtaatgtcaattctttgacgaatcgatttgactttcgttatgctgataaaaccaattcgttcacaatatgtatgatattaatctgaattgaaaaggggactgatcaaatgtgcacaagtcttacattggaaactgctgaccgtaaacatgtattagcaagaacaatggattttgcatttcagctggggacagaggtgattctctatccgcgccgttacagctggaacagtgaagctgacggaagggcccatcagacacagtacgcgtttatcggtatggggagaaaacttggaaatatattatttgccgacggcattaatgaaagcggtttatcttgtgcggcgctttattttccgggctatgcggagtacgaaaaaacgatacgggaagataccgttcacattgtcccgcatgagtttgtgacatgggtgctgtcagtctgtcagtctttggaagacgtaaaagaaaagattcgatctttaacgattgtagagaaaaaattagatctattggatacagttttaccgcttcactggatattgtcagaccggacgggccgaaacctgacgatagaaccaagagcagacggcctcaaagtctatgataatcaacctggtgtcatgacgaacagccccgactttatatggcatgtaaccaatctgcagcaatatacaggaatcagaccgaagcaattagagagcaaagagatgggcggattagccctttctgcttttggccaaggcttaggaactgttggtctgccgggggattatacaccgccttcccggtttgtcagagctgtttatttgaaagaacatctagagccggcggccgatgaaacgaaaggtgtaacagccgcttttcaaattttggcaaatatgacgataccaaagggcgcagtgataacggaagaagacgaaattcattatacgcaatatacttccgtgatgtgcaacgaaactggaaactactatttccaccactatgacaatcggcaaatccaaaaagtaaatttatttcatgaagaccttgactgtttggagcctaaagtgttttccgctaaagcagaagagagtattcatgagcttaattaattcacatcaatcagctgattccggtttgaatatctggagtcagctgtttttttatacaatcgttacggcgtctgaatggataggcggtttgcaaaagcgaagaaaaggcaaaggaaatggcgaaatcttatatgaaattattggaagaaaactgagtctttgcttcattagactcagttttcttgccgatatagaggttgcactagttgaatgaatcaatgccgttccctcatggtcacgcaagggtcttttcgcttgaatagaaaaaattaatcttaactcattgacaaacgtccaagacaaaggtacattttgatttattcatattaaacgactaggaatataggagtttatttttcggattattcagcctaaaaacatgataaaaggagtatcgccatgacaagcaaaaagaaacaaatcaaattaggggtatttttagcaggtacaggccatcatgttgcgtcttggcggcacccggacgcgccgtcagatgcgagcatgaatttggattattttaaagagcttgcgaaaacagcggagcgaggcaagctggatatgctgtttttagcggacagcctttcaattgacagcaaatcacatccaaatgtattaacaaggtttgagccattcaccctgctctctgctttggcgcaggtcacatcaaaaatcggactgacagcaacagcctccactacatacagcgagccattccatattgccagacagtttgcgtcattggatcatctgtccaatggccgtgccggatggaacgtcgtcacttcatctattgaatcaacagcgctgaatttcagcggtgaaaagcaccttgaacaccatttgcgctatcagcgggcagaggaatttgtcgagattgtaaaggggctttgggattcatgggaagaggacgcctttatccgtaataaagaaacgggtgaattctttgacaaagaaaaaatgcatgagctgaaccacaaaggagaatatttctcggttcgcggacctctaaacgtttcaagaaccccgcagggccagccggtcattatccaggcaggatcatcaggagacggaaaagcgctggctgccaaaacagccgaagtgatcttcacagcacaaaaccacctggaatcagctcaagaattttatcaatccattaaagaacaggctgcggaattcggacgtgatccagaaaaaattgccattatgccgggtattttcccaatcattgccgatacagaagaagcagcgcaagccaaatacaaggagctccaagatctgattatcccatctgtcggtctgcaaattctccaaaattacttaggcggaattgatttgtcggcatatccgcttgatgggccgctgccgaagcttgacgccgaagcttccaatgcggtgaagagccgcttcaagcttgttcaggagatggctgaacgtgacaatatgacgatacgagagctttacaaatacgttgcaggctccagaggccaccatatcttcgtcggcacgccggagcagctcgccgacaagatgcaggaatgggtggatacgaaagcgtgtgacgggtttaacatcatgcctccgcttcttccagaaggaattgaagtgtttgttgatcaagtggttccgattttacaggagcgcggcgtgttcagaaaagaatatgaaggcacaacattacgagagcacttcggtttggaaaagccggtaaaccgctatgcaaagtaaggaggaacgctagatgaagccacgataccgccttgcagttgaacgtgatgccgaacagcttctcgagctgacattgcgggcttatgaaccgattcgaaagctcggcattcgttttgctgctgctcatgcggatttggatttggtgctgaaaaatattcgggaaaatgcttgctacgtcatggaagaagacgggcggatcatcgcgaccatcaccttgagaatgccttggggaaaacagccgggaccgtatggcgttccgcatatctggtggtttgctgtggaccccgacaccggtaaaaaaggaatcggaacaaagctgcttcaatggctggaggaaacaatccttcgcgatacgttaaaggttccgtttgtctcactcggaacagcggataagcatccgtggctgattgagatgtacgaacgaaaaggatatgtccgctcaggtgaacaagaccttggaaaagggcatatcacagtctatatgaaaaaacaattgcgacatgatctataaaaatagaaaaggcgggaaaatcaaatgaagatgaaaaaatggacagtgctggtcgttgctgcattattagcggtgctctcagcttgcggcaatggaaacagcagcagtaaagaggatgacaatgtgcttcatgtcggtgcgacaggacaaagttacccatttgcttataaagaaaacggaaagctgacaggctttgacgtggaagtgatggaagcagtcgctaagaaaattgacatgaaactggactggaagctgcttgaattcagcgggctgatgggagagcttcaaacaggcaagcttgacaccatttccaaccaggtagctgtgacagacgaacgtaaggaaacgtataactttacgaaaccatacgcttatgcgggaacacagattgtcgtcaaaaaagacaatacagacatcaaatcagtagacgatttaaaaggcaagacagtcgcagccgttctcggttcaaaccacgcgaaaaaccttgaaagcaaagatcctgataaaaaaatcaatatcaaaacgtacgaaacacaagagggtacgctgaaggatgttgcgtacggccgtgtagacgcttatgtcaacagccgaactgtattgatcgcgcaaatcaagaagaccggtttgccattaaagcttgcaggagatccgattgtttacgaacaggttgcattcccatttgccaaggacgatgcgcacgacaagctccgcaaaaaagtcaataaggccctagatgaattgcgtaaagacggaacactgaaaaaactctctgaaaaatactttaatgaagatatcacagtagaacagaagcattaagaaacggcggtgactcaccagaatgaacacgattgattgggaattcatgatatcagcgttcccgactttaattcaggcccttccgatcaccttgtttatggcaatagcagctatgatttttgccattatcggaggacttattctcgcactcattacaaaaaacaaaattccagtgcttcatcagctgtcaaagctgtatatatcctttttccgaggcgtgccgacacttgtacagctgttcttaatctattacgggctgccgcagctatttccagagatgagcaaaatgacagctctcacagctgccatcatcgggttaagcttaaaaaacgcagcttatttggcagaaatcttccgggccgccctcaattctgttgatgacgggcagctggaggcgtgcctgtctgtcggtatgacaaaatttcaggcatacagacggattattttgccgcaagcgatccgaaatgcgattccggcaacgggcaatacatttatcgggctcctgaaagaaacgtcactggcctttacattaggggtcatggagatgttcgcccaagggaagatgtacgcttcaggaaacctcaaatattttgagacgtatttggcggttgcgatcgtctattgggttcttaccattatctacagcattttgcaggacttgtttgaacgtgccatgagcaagccataccggacttagaggtgaaatcagttgataacagtaaaaaatattcgcaaagcgtttaaagatctcgtcgtgctcgacggaatcgatctagaagtgaaacgcggagaagtggtggcaatcatcggtccgtccggttccggaaaatcaacgcttctccggtgcttaaatctattagagcgtccggatcaaggccttattgaaatcggagaagccaaactgaatgcggaaaagtttacacgcaaggaagcacatcggcttcgccagcaaacggccatggtctttcaaaactacaatctgtttaaaaataaaacggctctgcaaaacattacagaagctttaatcgtggctcaacataaaccacgcgacgaagcgaaacgtattggaatggagattctgaaacaagtcggtctggagcataaggctgacagctatccaatcacaatgtccggcggccagcagcagcgaatcggcattgcgcgggcgcttgcggtcaatccgcatgcgattttgctggatgaaccaacgtcagcgcttgaccctgagctcgtcacaggggtgcttcaggtcatcaagtccattgcggaaaaacaaacaacgatgatcattgttacacacgaaatggcgtttgcaaaagaggttgctgatcaagtgatttttatggcagacggccatattatcgagcagggaacgccagaggaactgtttgaccatccgaaaaacgaacggacgaaacgatttatcaagcaggtgggagagcctgcagagcttatataagaaggggagaagaacaatggccgacaaagcgtttcatacccgtttaatcaatatgcggcgtgatcttcatgaacatcctgaactgtcatttcaagaggttgaaacgacgaaaaaaatccgccgttggcttgaggaggagcaaatcgaaatacttgatgtccctcaattgaagactggtgtgattgcagaaatcaaaggacgggaagacggccccgtgatagcaatacgagcggacattgacgcgctcccgatccaagaacagacgaatcttccatttgcatctaaggttgatggcacaatgcatgcgtgcggacacgattttcatactgcttctattattggcacagcgatgttgctgaatcaaagaagggccgagctgaaaggtacagtccgctttatctttcagccggccgaagaaattgccgcaggagcaagaaaggttctagaagctggcgtacttaatggcgtttctgcgattttcggcatgcacaataagccggatctgcctgtcgggaccattggtgtaaaggaaggtccgctcatggcaagtgttgaccgatttgagatcgtcatcaaagggaaaggcgggcacgccggcatcccaaataacagtattgatccaatcgctgcagccggacaaatcatcagcgggctgcaatctgtggtcagccgcaatatcagctcactgcaaaacgcagtcgtcagtatcacaagagtacaggcgggcacctcgtggaacgtaattccagaccaagctgaaatggaggggacggttcgaacctttcaaaaagaagcgaggcaggctgttcccgagcatatgagacgagtggctgaaggaattgcagcgggctatggggcacaagcagaattcaagtggtttccttatttgccttccgttcagaatgacggcacatttttgaatgcggcatccgaagctgcggcacggcttggctatcaaaccgttcacgctgagcagtctccgggcggagaagacttcgctctgtatcaagagaagattccgggattttttgtctggatgggaacgaacgggacggaggagtggcatcatccggcctttacactggatgaagaagcccttacggttgcctctcaatactttgcggagctggcggttattgtattggagaccatcaaatgagcaaacaagggctgacagcaggtcttgcagaggctgtgagaacgtcacaacctgagcattcagttgacgcgattcacgaagcaaaaaagggattacttgattttactgccgcttcattcgcaggaagagaagataaaggaattcaaaagctcctccgtctgatagaggatgaaggaggccggccccttgttcctgttatcggacagggcaaaaaggccgcgccattacaatccgcgatgctcaatggatttatcgcccatgcattggattttgatgatgtccactccgatgtaagaggacaccccagtgcagtcatcgtaccggcccttattgcttctgccgctcgcggacatgacgagcggcttcttggcgcttatgttgttggtgttgaagtgatggcacggctgggagaatcaattggcagccgccactatgagaagggctggcataatacaggtacgcttggtgccatcgctgctgcctgcgccgtaggttatgctgaggagctgactcaggaagagttggaaaaagcaattggttttgcggctacgcaatctgctgggatgagggtgcaatttggaacagaaatgaaaccgctgcacgccggtttggcggctcaggctggcttgctggccgttaagctggcccaatcagaatttggcgggtcccgcacggcacttgatggagaaactggtttcttcagtctgtacggtgacgttgagaaagcacaacacactttgctaaacgattggggggcaccgtggagaattgtgcagccgggtctatggtttaaaatctatccattttgttccgcggcacaccatgctgcagatgcggtacgacagcttatctccgaagaaaccatttctgctgccaataccgaacgtattgaagtgatatttccgccaggcggagatgctgcattgacggaaagatctccaaaagctggagaggaaggccgtttcagcgttgaatatgtgattgctcttgctttgcatggacacggcctgaccgttgaacatttcagcagccagccgatcccaaacggggttcaaacgacaatggggcgaattcagcgcgtatatgacaatgctattcagccggctcctcatgccgttccaaaaggccgtttcacgattgtccgggcctatttatcagacggccggatttgcgaagcgcgtgtggactgcccaaaaggggcaccaggaaatgagctgtctgaagaagacataatagaaaaattgacattaacggtcccgcaagaaaaagcgcgacgcattataacagccgttgaaaaagccgatataaaagaatttttagctcatattgaataagatcaactctattcggtgatttcagatgatatgataaaaccaatcatacgtttgaaaaaggagaaaaccatgacggtgaatgacgcggttgtattcattttggctgcctttttactatggggagcagcggattattgtttgggaaacagatgggggctaggcgagcggtttgcggacggctttaaggctatggggccgctggcgctgtccatgatcggaattgtatcgctggcgcccgtgctggcagcaatcttgattcccattgttgctccgttttacacagcgattggcgcggatccttcttcctttgcgaacaccattttggcgattgatatgggaggatatgcgctggctggagaaatggcgaaagatccgcaggccgggctgttttcatgggtgtttttaggaacaatgatggggccggcaatcgtcttcacgattcccgtcgctcttggcatcatcgaaaaagaggatcatccgtattttgcgaaaggcatattaatcgggctgtgcacagtgccgatcggttgcttaatcggcggattatgcgcaggctttgacatcggcatgataggtaaaaatcttctgatcccgagtctgttatctgctgtcatcgcttttgggttatggcgatacaccgacagaatgattcagttgtttcatctcttcgggaaagcggtcagtatggttgcgattatcgggcttgcagctgtttctgttgaaacgatgaccggcattgtgctgattccgggaatggagaatgtcgagacagggatacaaacgacagggaccatcgccattgctctggcaggggcgttcccgatgacggcatttattacaaaaacctttaaaaaaccgcttcaggctctggggaaatgccttcatttagatgagacagcaacagcaggcttagtgacctctttggcgcatcatatcccaatgctggcttcattaaaggatatgacgccgagaggaaaggtcatcaatgtcgcgtttgcggtcagcggcgcctttgtactcggcagccatctcggttttgtagctggaatgaaaaaagaaatggcggcggccatgatcattgggaaattagcaggcggagtcacagctgccgcagcggctgcttggatgacacctgcacaatcagctaaacagcaaaaacgtatctcagccagccatagctgaggcaggagctgtttcaactttgttcaatcgggaatgttacagtaaagatttctgtgaaagagggttggacacatggcggtgaaagaccggtacatgtcaaaaataaaacaggaaaccaagccttggatcaaacgattcgggaggcttggttattttgcattcggcggcgtttttattctgcttggggttttggcttttatgacggctgccggggcaggccgcgccaaagattcgagcggagctctccaaacgctatcacgcatgccgtatgggtcactattgcttttttttataggcatcggccttatcggctatgtgatctggatggtgttaagcgcgatcaaggacacggaggggcacggaaacagcaggcgaggcctgtcgcggagaataggaaactttttcagtgccgctgtttacacatccatcgcttggaatgccttgcgatttgtgtttggccaaggggacggcggcacttcagaacagacgtggtccgcttatgtattggcgcagccgttcggccaatggctcacagggcttacgggtgcgggttttatcgtatttgcgattgttcaatttatgaaaggcgttcgggctgcttttatgaaagaattcgatacatcaaaaatgaacaaacagatgatatgcatcacgaaaaacacaggacgcgcaggcaatatcgcccgggccattattttctcggctatcggctattttctcatcaagacagccatgaccgctgatcccgacgacacaagaggctttgacggcgcgctcgcagaactcgcgcagcagccgcatggcaaattgattctgtctatattggcattaggcctgatcctatatggaatgtacgccattatgaaaggcatttatcagcatatgacttgggagaagtaagctctgggcaggtccgcgcccagagcgtttttcagtttcttagaaatcaggtggatgaaagccggcgccagcctgtataataaaagcaaatcaaaagcagttttatcaggactgatccacagggaggtgcagaatggatcgggaaaaacagcaattaagcatagaagcggcaaggctttactatcagtctgactacagtcagcagcaaattgctgagcagctcaacatttcaaggccaaccgtttcccggctgctgcaatatgcaaaggaaaaagggtatgtccagattcgcgtcatggacccttttgaggatttggatgcgctcggttccatacttgaagagaaatacgggctccttgaggcgcatgttgtgttttccccgacacccgattatgcaggaattacacatgacctaagccgctatggtgcagaatatatgcatgaaacggtaaaagacggcgacattgtcggcgtcagctggggaaccaccatgtatcaaatcgcgcaaaacatgcagccgaagcaggtaaaaggcgtcgaggtcgtccagctgaaaggcggcatcagccattcccgggtaaacacgtattcggctgaaacgattcagctgtttgcagaggcttttcaaacgatgccgcgctatctcccgcttcccgtcgtgtttgataatgcggatgtgaagcgaatggtggagaaagaccgtcatattgaacggatcattgagatgggcaagcaggcgaatatcgctctctttacggtcgggactgtccgtgatgaagcgctgttgtttcggctcggatattttaacgaagaagagaaagccctgctgaaaaaacaggccgtcggggatatttgttcacgcttttttgatgcgaaagggaatatttgcagcagcgccatcaatgaccggaccatcggtgttgagcttcaagaccttagactgaaggaacgctccattttagttgccggcggaagcagaaaagtatcttccattcacggagcattaaccggaaaatatgccaacgttttaatcattgaccagcataccgcgagggcgcttgttaatgatttgtgacacgttcaaacctttcattgaacaaaatttcaattaccaatttacatatgttcaaaagtcggttatgctaaaaaatatcttaacaaaaaaggaagtgtgcgaaggatgtcattagccaacataattgatcatacagctttgaaaccgcatacacaaaaagcggacattctaaaactaattgaagaagcgaaaacatacaaatttgcttcagtatgtgtcaatccgacatgggtggagcttgctgcaaaagagcttaagggaactggagtcgacgtttgtacggtcatcggcttcccgctcggtgccaatacaactgaaacaaaagcgttcgaaacaaaagacgccatttcaaaaggcgccactgaagtggatatggtcattaatattgccgctttaaaagacaaggaagacgatgtggtggaagctgatatccgcggtgtagtggaagctgtagccggaaaagcgcttgtcaaagtcattatcgaaacgtgccttctgactgatgaagaaaaagaacgtgcatgccgtttagcggtgtctgcgggagcggatttcgtaaaaacatcaacaggcttttctacaggcggcgcaacgaaggaagatatcgccttaatgcgcaaaacagtagggcctgatatcggcgtgaaagcatctggcggcgtcagaacgaaagaagatgtagacacaatggtagaggccggagcaagccgaattggcgccagcgcaggcgtttctatcgtaaaaggagaaaatgcatcaggcggagacaactattaagagctgacggaaggcagactgctttccgttttctgaggaaacagtaattgtaagcgaatacaaataaaggagaaacacatatgaagtatttgattgggattatcggtttaatcgtgtttttaggcctcgcgtggatcgcgagcagcggcaaaaaaagaattaagatccgcccaattgttgttatgctcattttgcaatttattcttggctacattctcctcaataccggaatagggaatttcctcgtgggaggatttgcaaaaggattcggttacctgcttgaatacgcggcagagggaattaactttgtgtttggcggcttggtgaatgcggaccaaacgacattctttatgaatgttctcttgccaatcgtgtttatttccgctctgatcgggattctgcaaaagtggaaagtcctcccgtttatcattagatatatcggccttgccctcagcaaggtaaacggtatgggaagattggaatcgtataacgcagtggcttctgcgattttagggcagtcagaagtatttatctccttgaagaaagaactcggtcttttaaatcagcagcgcttgtacacgctttgcgcatctgcgatgtcaactgtatcaatgtcgattgtcggtgcgtatatgacaatgctgaaaccggaatatgttgtaacagcgcttgttttgaacttatttggcggtttcattatcgcttctattatcaatccgtacgaggttgcaaaagaagaggatatgcttcgtgttgaggaagaagaaaaacaatccttcttcgaagtgctcggagaatacattcttgacggtttcaaagtagcggttgtcgtcgctgcgatgctgattggatttgtcgcgattattgcattgatcaatggcatttttaatgcagtattcggtatttcgttccaaggcattcttggatatgtgtttgctccattcgcttttcttgtcggtatcccatggaatgaagctgttaatgcgggaagcattatggcaacaaaaatggtatcgaatgaatttgtcgccatgacgtcgcttacgcaaaacggtttccatttcagcggccgtacaacagcgatcgtatcggtattccttgtgtcatttgcgaacttctcctcaatcggaatcattgccggtgccgtaaaaggactgaatgaaaagcaaggaaatgtcgtcgctcgtttcggcttgaaattattatacggtgctacgcttgtcagctttttatcagcagcaattgtgggcttgatttactgaacttaatcgaaaaggatcggtgaccaaacatgagaatggtagatatcatcatcaaaaaacaaaacggaaaagaactcaccactgaagaaattcaattttttgtgaacggctatacagatggaagcattcctgattatcaggcaagcgcgcttgctatggcgattttcttccaggatatgagtgaccgtgaacgcgcggacttgacgatggctatggtgaactccggtgaaacgattgatctttctgccattgaaggaattaaagtggataaacactctaccggcggcgtcggcgacacgacaacgctcgttctcgctccgcttgttgcggctcttgatgtgccggttgctaagatgtccggccgcggcctcggccatacgggcggcacgattgataagttagaggcaatcatgggcttccacgtggaactgacgaaggatgaatttattaaacttgtgaaccgcgacaaggttgcggtcatcggccaaagcggcaatttaacgccggctgataaaaaactgtacgcgcttcgtgatgtaacgggaacggtcaattccattccgctcattgcaagctcgattatgagcaaaaaaatcgctgccggggcggacgccatcgtgcttgacgtaaaaacgggagcgggcgccttcatgaaaacagaagaagacgcagctgaacttgccaaagcgatggtacgcatcggaaataacgtcggccgtcaaacaatggctgtcatttcagacatgtcccagccactcggctttgcgatcggaaatgcgcttgaagtcaaagaagcgatcgacacgctcaaaggcgaggggcctgaggatcttcatgagcttgtcttaacgctcggcagccagatggttgtgcttgcgaaaaaagccgatacattggacgaagcgagagcgaagctggaagaagtcatgaaaaacggcaaagcacttgagaaattcaaggatttcctgaaaaaccaaggcggcgacagctcaattgttgacgatccgtctaagcttccgcaagccgcatatcaaattgatgtgcctgccaaagaagcgggtgtcgtctctgaaatcgtcgcggacgaaatcggcgtcgcggcgatgctgttaggtgccggccgcgccacaaaagaagacgaaatcgatttagccgtcggcatcatgctccgcaaaaaggtcggcgacaaagtagaaaaaggggaaccgctcgtaacgctttacgctaaccgagaaaacgtcgatgaagtcatcgcaaaagtctatgacaacatccgcatcgccgcggaagcgaaggcgccgaagctgattcatacgttaattacagaataaaaaataaagcacatcccatgctgagcggggtgtgcttttttaattataggatgtgatcggctggatattcctcttggctgatttttttcgcttttgtaacatttcttttgaaatggtagatgagatagcaaaggatgatacaaggaactccgcagaaaagtgcgattctttgattgggatcaaaagcaagaccgatacaagaagcagaacataataagagagcggctataggcataagaggataaagcggcgtgcgaaatgtcagatcttttacatcccccccttttttcaaaaatctctttcgaaacaagagttgggacaaggcaatgctcatccagaccacgactcctgcaaatccagcaattgcgaccatcaccacatagacagttccaggggccacgatactggaaacgagagataaacaagatacagccatactgatcattaaggcatttaaaggaatgcctttagatgtcactttcttaaaacgggagctgatcatgttttcatttgctaaagaccacatcatacgggtcgaagcatataagcctgagttggcgacagacagcaaggctgttaatattacgaaattcataatatcagcagcgtaaggaattccgatctccgcaaatacggcgacaaacgggctttcaatcacgcctgcgtccttccatgaaatcaacccggataatatgaagacagcgccaatgaaaaaaatcacggttctccatgcgacattacggatggatcgcggtatatccttttgaggatttgctgattctcctgctgtaacgccgattaactctgtaccggaaaaggcgaagctcacagatatcatcgcgataaaaacggcgagaaagccatttggaaacaacccgccatgatctgtgaagtttgacaacataggagcatccgccgttccgtttaaagagatcaggccaaacatggcggctcctcctaaaatgataaataaaataatggtgacaatctttacgctggaaaaccaaaattcagtttccgcaaataacttaactgaaaatgcgttgcatataaaaagaagggctgcaaaaatcgcactccacatccatacactgctgtcagggaaccagcgctgcatgagaataccggatgcggtaaactcagagcctaccgtcaccacccaattgatccagtacatgatgccgaccataaaaccggtagatggaccgataaatgttgtagcatatttttgaaaagagccggtcaccggcatggcaaccgacaattcgccgagacattgcatgacgaggtacatcatcaacccgccgattacataagcgagtatcgtaccgccgggtccggcttgatgtagcgtatagcccgtactgaggaaaagtcctgtgcctatgacgcctcccaatgagatcataaataggtgcctgcttttcattgtgcgttttagctgttggctgctgttctcctgaagattcactgtctcgccctccttttagctgccattccttaggcagatgagtttcttatacccaaaatacaacctgccagaagatcacttgaatggggagagtttcattccttttaatgcgtgtaacagaacatgagctgcagctctgcttgtcatatctcgaaaatcgagggtagggtcgacttcaacaatttcaatcccggcaacattgggctgttgtgcgatgtacttgactgcttcaagcaattcgtctgtatagaggccgcccgggccaatcgctggacagccgggtgcatgggactggtctaagacatccatgtcaacagatataaaaatgaaatctgttttatcttgaacaacaggcaaaatctcttttatcgttgggattagtcctttttcccggatcatgtccatcgtgtgaatgttcacgttatgtttttttgcatatgcttcataggcctggctgttgctgaattctctgatacccagctggatcaaatgttgaccttcaatgatctcttcatccaaaaggcggcggaagggggtgccgtttgtcggccccccgtcctccgtattgcgaacatcgtgatgggcatcaaattgaatcaccgctgtcgttccttttgtttgtgctatcgcttttattgtggagtagctgatagagttatctcccccaagtatgagcggcacccaatccggatgatccgaaagcagagcgtgcatggtttggaaaatgtgatgatgtgactttacgatatcagtgacatgaatatcgatatcccccaggtcatatagaagctctgatacgacgtgctctccaagctcagcagaataggctgatgaatgtttcagagcctggcgtattgttccgggtgcaaaggaagcgcctgaatgactgatggaggattttgatagggggacacctatcaacgccggtcccttaatgtcctggccgtcccatgttgcgatcaggtcgctcatttttgtgacatcccggtctttaaacgaagatccggcctctctgagaaaagggtacttatccaagaatggctccctccctgttgacaacaattgttccatttttcatgacttgatgtacatgattgaccccgtagtgatacggaatatacatatagttcggggcttgccaaatgacaagatcagctgagcggccagctttgagctgaccggcttcttctccttttcctatggcatatgcggcattgactgtgaccgcgtgccatatttcttctgcagtcattttcagatgaagcgcggcaatggacataatcagctggatattttcagtcggcgagctgccaggattaaaatccgttgccaagctgacacatacaccttcatcaatcatagctcttgccctggcgtatgtgcttttgccaagataaaatgtcgtgcccggcaagaggacggcgatcgttcctgcctcagccaatttctttatgccttcgtccgatgtacctaccaaatggtcggctgagacggcctttagcttacctgctaattcagcacctccaagcggatcgatttcatctgcgtgtatttttaatccgaagcctgcctcagctgctttttgtaaataacggcgggattggctgactgtaaaaacgcctgtttctgtaaaaatatcagcaaagctggcgagctcctgctctttgatttccggcaaaagggaaagcatttgatccagaaaatcatctggatcgttttgatattcgggaggaatcgcatgggctcccataaatgtggaaacaaggtcaacaggctggctttcatgcagtttctttgcgacacgcaactgtttgagctctgtctctttttccaagccgtagccgcttttcacttctgctgtggttgtgccgtaggacagcattctttgcagatgaaaatgggctttttgcagcagctcttcttctgaagccgccctggtatccttgactgtagacagaatcccgccgccctgcgccagaatatccaaatatgaaatgccctgaagcttaaggttcatctccttttcacgagatccgccaaatacaagatgggtgtgcggatcaacgaggccaggcgttacaaggcgtcccgaacagtcaatgatttcgtctgcctcgtaaccggcttcagcccctttttgtccggcgaacacaattttctgttcatggatgccgacaacagcgtcttcgatcacatgaagatcctgcatgcttttgcctgcccgcggaccgctgctttccatcgtcaaaagctgaccgatgttgatgagaatcgtatcaatttgctttggcatgtcatcactcctttatttttgcatcggcacgataatgtcctgttccttcgctacttcaacggcacgttcataacccgcatccgcatgacggataatgcccattcctgggtcgctcgttaagacccgcgcgagccgctcgtcagccagctcacttccatcggccactgcaaccatgccggcatgaagggaatagcccattccgacgccgccgccatggtggaaggaaacccagcttgcacccgccgccgtgttgacaagcgcatttagcacagcccaatcaccgacagcgtcacttccatccttcatcgcttctgtttcccggtttggagaggcgacagacccgcagtccaaatgatctctcccaataacgacaggcgcttttagctccccggttctaaccagctcgttaatggcgaggcccatcttttttcgttctccatatccaagccagcagatacgggacggcaagccttggaaggtgactttttcctgtgccatatcaatccagcggtgaagggctttatttgtcgggaacagctcttttaataacgcatccgtacggtaaatatctgccggatctccggaaagcgccgcccagcggaacggcccttttccttcacagaataaggggcggatgtaggcagggacaaaccccggaaaatcgaaggcattctccagcccttcatcctttgcgacttgccggatattgttgccgtagtcaaatacaatagagcccttttgctgaaaggccagcatggcttcgacatgttttttcatgctttgcttcgcaaggcgcacgtaaagctctggagtgtcttgacgcaaacggtcagcttcatcaagggaatagccctcgggaacataaccgattaaagggtcatgggcagatgtctgatctgtcacaatatcaattttgacgcctcggttcaaaagtgtgtgatgcacctcagctgcgtttccgagaagtgcaatggacaaaggttttcctgccagctttgcctcttcagcccaagctaaggcttcctcaatcgatgctgtttttcgatcgcagtattttgtttcgatccgcttgtcgatgcgtttctcgtcaacctcgacggcaatcacgacgccttcattcatcgtgactgacagcggctgggcgcctcccattccgccgagacccgctgtcagcgtcaacgttccttttaagctgcccccgaagtgctgtcgcgccagctcagcgaaggtttcataggttccttgcaatatgccttgtgagccaatgtaaatccagctgccagccgtcatctgtccgtacatcattaacccttttttctcaagttcgtggaaatgctcccagtctgcccacttcggaacaagaacagaatttgctaggagcacgcgaggggcctgcgggtgtgtacggaacatgccaacgggctttccggattgcacgagcaatgtttcatcattttttaatgttttcaaggaatgctcaatggcgtgaaaagcgtcccaatcccgtgcggctttgccaatcccgccatatacgatgaggtcctccggcttctcggcgacttctggatcaaggttgtttcgaagcatccgaagcactgcctcttgctcccatcctaagcattcaagctctgttcctctgttggcacggattgatttttttacatcagtcatatgttcatcccccttagttctttattctgatgatcaggtattaaagattctttcttcagccagtcagtcaagcgttcaatgtcataggaaaaaacacggtcctgctgaatggacggcacgacttttctcatttcttgaaaaagctgtttcgtataggacgctgcatgttctatgcctctgtattcaacagcctgcaatgcgcaaatggcttcgatcgcaatgactctccttgtatttgcgatcacctgataagcatgccgagcggcgatggttcccatgctgacatggtcctcttggttggcggatgacggaatggaatccacacttgcaggatgggccagtgttttattttcagaaacgagtgaggccgcggcgtactgcatgatcattgcaccggattgcagaccgggatgagggctcaggaacggcggcaggtcattcagctgcggattcacaagtcgttcgatcctacgctctgcgatattcgcaagctctgatattgcgattttcagaaaatccatggcaaaggcgattggctgtccgtgaaagtttccgccggaaatcactttgtcaccgtcattgaaaatgagtggattgtctgtagctgcgttcatttcaatctctaatttttctttgacatatcctagtgtctgccaagtcgcaccgtgtacttgcggaatacagcgcaatgaataggcatcctgtacccgcagttctccctgggaggttgtcaggccgctgtcagatagataaaagcgaattcgttctgcgacatcgatctgctcctgatagccgcgggctaagtgaatatcctcgtcaaatgcatcgataattccctgcaacccctcaatcgttaagctggcaattcgttctgtttgataggctagtttctcagcttcgatgtaggcgaccacccccattgcagtcatggcctgagtcccgttaatcaaggcaagcccttccttggatgtcagcgttaccggttgaatacctgcttttttcaagcctgtcattgccggcattctttccccctcaaaaaagacttctccttgtccgatcagcgcaagcgccaagtgggaaagcggcgccagatctccgcttgcgccaagtgatccttgctgagggatgacaggatggacgcgtttatttaaaaaagcaagcaactgctcgatcagctcagcgcgtacaccggaaaagccttttaacagcgcattggcgcgcaaaagcagcattgccctggaaacacactcaggaaaagggtcgccgactccgcaggcatgagaaaggattaaattcagctgcagcgccgccgagtcttctttctgaatcaggacatcgctgaatttgccaaatccggtgttgatgccgtagattgtcttttcgtcgcgtacaatccgttccactgctgctctgctttttttcacgcgctccatactttcctcagaagccgctgcctcctcaaaatcaaacagcacacgagcgacgtcggctgttgtcaatgaagaaccgtctaaagtcaccataagcccaactcctttttctttactttggtaaagcgcccatacaaaaaggagctatgctgtgaacttctgttttcacgcatagccccctatcgtctaagatctatgggctgtttcatatgtgattaattccaacgccgaatgtttcatgctcaagacctttaatcggcgccccgattgttccgtaaagcgagacagcgatccaatcgccttccgcttcactttcataaggatttcccctcaaaacggcaaacctcaatcccaccgtccgaagcagcgatcccagcagcatttcacctctggtcacgccatgcaaagcctccatcgtcgcatgataaagcgcatgtgactcccgataaccctcagattgaatgacaccgctctttttggaagcggtttcaattgcggctactactttatgtgcgtccattgatcctaccttgccaagacagaccttccatccgtctcgctccagctcctcaacctgcgtactttcttccgcctcattcagcagcaggagaacagacagccggccgatccgacgctctttatgcagtgtcatatgaatcactcaattcctaaaaattctgataactattaactgagtattatattaattggttcagcagcagaagtcaaaaggttttttatagtctttaacaagttagattgctattgtaatagcgtgacgcagaaagcagaacaggttttttcagcgattgcacacgatatccagacaaggaggcaagcgccgctgtctaactctcaatatgcgtttactaagtcgtatttttcgcaaggcgttttataaagagccagccgaatgactctggtgttgacgggcaatcaggcatcatcttaaaaaacgccgacaacgaaatggctgtatcacagttgatgcaaaacctgacaaagcagttattacatgtacgcgaaagaaaaacagacgtgatgcaagaaggagaaacagcaaaagagttgaactatgaaggagaggatatgcaagcaacaagttctgcgcaaaacagacagacatcagtctgactatgtaagtgaagtgagaaatcacctatctggatgaatatgaaaacattcggctgttttaataggccggggtatcttcatagagaaatgtaagcgtttaaaatttaataaaaaagagaggcgaattgtttagatgttcaaccgattgttccgtgtatgttttcttgcagctcttatcatggccttcaccctcccaaactccgtctatgcacaaaaacctatatttaaagaagtcagcgtccatgacccttccatcattgaaacaaacggcactttttatgtttttggatctcatctcgcttcagctaaatcgaatgacctcatgcaatggcagcagctgaccaccagcgtaagcaatgacaacccacttatcccgaatgtctatgaagaattaaaagaaaccttcgaatgggcgcaatccgatactctttgggcggctgacgtcacgcagctggcggacggcaaatactacatgtactacaacgcctgccgcggcgattcgccaagatccgccatgggtgttgccgttgctgacaacatcgaaggcccatacaaaaacaaaggcatctttttgaaatcaggaatggaaggcacaagcagcgatggaacaccgtatgatgcaaccaaacatccgaatgtcgtcgacccgcataccttctttgataaagacggcaagctgtggatggtgtacggatcatactcaggcggcattttcatacttgaaatgaatccgaaaacgggcttcccgcttcctggacagggatatgggaaaaaactgctcggcggcaaccacagcagaatcgaaggcccgtatgttctctacaatccagacacccaatactactacttatacctatcatatggcggtctcgatgcaacaggcggctacaacatccgtgtggcccgctccaagaaaccggacggcccttactatgatgcagaaggcaatccaatgctcgacgtccgcggcaagggaggcacattcttcgacgaccgttccatcgaaccatacggcgtcaaactcatgggcagctacacttttgaaacagaaaatgaaaaaggcaccgggtacgtctcaccaggccacaactccgcatactatgatgaaaaaaccgggcgttcctatttaatcttccacacccgcttcccgggcaggggtgaagaacacgaagtcagagtccaccaattgttcatgaacaaagacggctggccggtagcagcaccatatcgttatgcgggcgaaacattgaaagaagtaaaacaaaaagacatcacaggaacatacaaacttatccagcacggaaaagacatctcagccgacatcaaacaaaccatcaacatccagctcaacaaaaaccacaccatttccggggaaatgaccggaacatggaggaaaaccggaaaaaacaccgccgacatcacgttagcaggcaagaagtataacggggtatttttacgccagtgggattcggtgagagagaagaacgtcatgacgtttagtgtgctgaataccagcggtgaggctgtatggggatctaaataagatggagaagcgccttcgagggaaggtgtttttttatgagctttattgactataagaaacagttaagtgggaggaaaaattagaactggaggagagattaaaggcttaaataaaaagtccctactatgattgttttctcctttcatagggtgatgagatcgtatttttagcaatttagaaccagttctatacctctcaagacaatcctttttacctatttatccaatatgacccatcatgtaatatgaaaatagtctgtattgtaaagaatttacacagtttgatagaaacacgaggtgttgcggcatgcatagtgaaatgttgttacattcggtaaaagccgacttacatgaaaagcaggaacagatccatcaattaaaacgagtgctgcacgaaattaggcaaatcaaacacgatttctctgaggcccagcatctcattcaccggcctcatcttaaccgggaggcatggagaggaacacatgctgagcggtttgaagatattcgtgaaggaatgaacaaagcatatcagcaaatcaaaagcgatcaagtcagcggaatcatcgaaagcatagaaggaaaaatccactcattagagggcgatgtgtattctataagacgccaaatcacgaggatagagcatgaaatagagaaggaaaaacataaaaagtgaggtgagcacaaatggcacaggaaattaaaatggtgtatgacacagtgaagcaagggctttctcagctcaagaattcagctgaactcaagtcctcattgcccggtcatctctcaggcagaaaccatttgaatgttgtgaagtccatcgagcaattaaataaggacatcaaagagctcactgaagcatatgcgtctgttctggccaagcatatcgcacaaacggaaagcgcggtaaacgccatgaaggaaacggacgaaaacatatcatcttccatgaaataaagcgcgggaggacaagggattgaaaacattagatgtccacgctcttcacgagggcattcagcatacgattgagaaactggacaagcaaaaacaacagctggagaagctggaaaaaagcgttgagcatctggcaggcatgaaggatgcgctgaaaggaaaaggcggagatgccatccggaccttttacgaggagtgccacaagccttttctccttttctttggcatatttatcgacgaatacaaaaaagtgctgaaacaaacacagcatgcgatttcctctgtagaatctaactcccacggcatgatcgcagaggcttttctctcacacgatgcgagacatggggtcaagcatgcacgagaagtgacagagcagctcactgacgcagtcaatcgccagacatcagccatagatcacatcgtcagcctgccgacagtcaatgattccttttttcggatggaaacagaacaggctgagcggctgatttcagacaccctgaataagctctttcaatttgacggccagcaaacccaagcactagaagccgcaaaatcagattttcaaacgatgaaaaaatacattgatcagctcgaaaccatgtacaccggcccgaaaattgaaatcacaggctacaaaagcggctccatcctgaaatcacaggaagaagaaaacatcaaccaaatcttcggcgcgattaacccgcaaatgaagcaggcggatgattcaccgatggagatgatgctgaagaaattagccgagaatgaaaagtctaaagtggattcagttgtcaaaacgggtgattctaaaaaggtaagtaaaaatatcatcgttatcaatggtaaagtgtataatacgagtgaacatagagaacatataaaaactgatttctcaaatgcagaggttaagcaagtcgtttataatgatacactttacaatgtatacatatctggtaatgacatgaagcttgaacctgtcgtctcgctttcggacattaaagtggatgagaatggatatgtgaaaattttagagacggctgtagaacttaccggcgtgtatgatctatttaaagcagccacgggcagagatccggtatcaggcgaaaaagtcacagggaaagaccgtgttgttgcctccataaactcagtaccatttgccaaaatagctaagttagaaaagttaatagatattaataaacttattaataatgggaaaaaggctaagaaggcttcggaagttaaaaacgttgctaaggataaagggaaaattgcgaatgatgtaagtggatctgctaataaaattaattctgatttaataaaaaagtatgctagagatatagaacaacgcacaggtagagaattacctaaaaatcaaatagataaattaaaggaagcattaagaaataaagaatataaaaaaatgtcaccaatagagactgcaaaacacaggactaaatttgataaagtaaaaaataaagttataaaagaatgggaagaaaacactggacaaaaatggcctgtttataaggaaaatgttgtatctgaaaaaacaggtaaaattattagaaaaaaaggggataagtatgatgctcaccatataattgaaaatacttttggcggagaacatgaatggtggaatatgcatccagcaaaatttcctaacgagcatcaagctgggattcatggtacaggctcaccagcaaatgaattatttaaaggaggcaaaaaaaaatgagttataattttataaaatcaaacaaagaaaatgatttttatccagtgaatcaaagtgagattgaagaggttgaaaaaaatttaaacttaaaattacctagtgaattagtgaatttttatttagaagttggctatgggtttattaaaggatcagagtttaatactaatcgcattttggatccatattctgtaagagactttcgattgaggataaatgactttgaattttatcctgacatagaaatatatgatgagtttgagaatgataaattaatattttttgaaggtagtgaatcggcattaatgtcaattgaattaaatgataataataaaaatccgatttactattatgatattcaaattgcaacttctcttaccgagttcttaagaaaaatagaagagaatgatcagtattatcttgatttattagatgatgaatgattttaacattatcccgttacctctcccttaaaggagcaagatgacatgttattgatcaataaacagaaggaccctgtttttcagtttttagctggaacattccatcaagatattgaaactcctgatgacgctatacaagagttattaatagaggaaagtaaggaatatttggaggatgctattgtctttttaacggattttattgaaagtgagcattcagacaataagaaaaacgattacattcaatcttgcgcagatggcgtgtatcttcctgcgtttaatttagaaccaatagattggctaaagaatgtaatagtacagataaagaagtctttaaaaaaatttaaacggtaacgattcataaccttgattggaaaaaatgcctttcaaggtttttaattacaataattttttattgaagttaatactaagttcaaatctttatgattacttttgttctagaaacgatagtcaacaccaaaaatgaaagcgttgacatctcacgaatctagtgctaaagtatacctacaaacaaataaaacgacccgtcaggattgttactgcgaaagcaggcaaaacctaaatggtgcaggtgcaggaggagactctcgcaatctgtgtcatttaggtttttttattctcttttaggaggtgatgcagcatttgatacaaaaaaagctggtgaaaggcggccacctttcatccagcagtccccccataaaaaggaggtatacacatggattatgataaattatcgaaggacatattacaactcgtaggcggtgaagaaaacgttcagcgcgtgatccactgcatgacgaggctgcgttttaatcttcatgacaacgcgaaggcggatcgcagtcagctggagcagctgcctggagtgatgggcaccaatatcagcggcgagcagtttcaaatcattatcggaaacgatgtgccgaaggtgtatcaggcgattgtgcggcacagcaatctcagtgatgaaaagagcgctggttcatcctctcagaaaaagaatgtgctgagtgcggtctttgatgtgatttctggggtgtttacccctattctgcctgcgattgcgggagcggggatgatcaaaggacttgtggcgctggcagtcacgtttggctggatggcggagaagagccaggttcatgtcattttgacggctgtcggtgacggtgcgttctacttcctgccgctcctgctagcgatgagtgcggcgagaaaattcggaagcaatccgtacgtagcggctgccattgcggcggcgatcctgcatccggatttgacagccctgctcggtgcggggaaaccgatttcctttatcgggcttcctgtaaccgctgccacttattcgtcaacggtcatcccgattttgctgtcgatttggattgcttcatacgtggaaaaatggattgaccgttttacacacgcatctctcaaattgattgtggttccgacattcacgctattgattgtcgtgccgctgacattgattacagtcggtccgcttggcgctattttaggagaatacttgtcttctggggtcaattatttgtttgatcatgcagggcttgtggcaatgattttgctggcgggtacattctctttaatcattatgacgggcatgcactatgcctttgtgccgatcatgatcaacaacatcgctcaaaacggccacgattatttactgccggctatgtttttggcgaatatggggcaggcgggagcatcatttgccgtcttccttcgctctagaaacaaaaaatttaaatcactcgcgcttaccacaagcatcacggcgctgatggggatcacagaacctgcgatgtacggcgtgaatatgcgattgaaaaagccgtttgcggccgctttgattggcggtgcagccggtggcgcgttttacggcatgacgggtgttgcttcctatatcgtcggggggaatgcaggtctgccgagcatccctgtctttatcggcccaacgtttatttacgcgatgatcggccttgtgattgcgtttgcggcgggaacagcagctgcgtatttgcttggattcgaggatgtgccttctgacggcagccagcagccggcagtgcatgaaggcagcagagagatcattcacagcccgattaagggagaagtgaaagccttaagtgaagtcaaagacggagtgttttctgctggggtcatgggaaaaggatttgccattgagcctgaagaaggagaagttgtttcgcctgttcgtggaagcgttaccaccatttttaaaacaaaacacgcaattggcattacgagtgatcagggagctgaaatactcatacacattggattggacacggtaaagctggagggacaatggttcacggctcacatcaaagaaggcgacaaggtcgcaccgggagatccgctcgtgtcctttgatctggagcaaatcaaagccgcgggatatgacgtcattaccccggtgattgtgaccaacacagaccaatattcgttttcgccggtgaaagagatcggtaaagtgcagccaaaagaagcgctgcttgctttatcttgaaaaaactaatggggtgatcaatatgagttcaaatgaaaaacgatttccagaaggatttttatggggcggcgcagttgctgccaaccaagtggagggtgcttataacgagggtggtaaggggctttcgacagctgacgtatcgccgaacgggatcatgtctccatttgatgaatcaatgacttccttgaatctgtatcacaacgggattgacttttatcatcgttataaagaggatatcgccttatttgcagaaatgggatttaaggcgttccgcacatcgattgcgtggacgagaatttttccgaatggcgatgaagaggagcccaatgaagaaggcctcagattttatgatgatctgtttgatgagctgttaaagcatcatattgagcctgtcgtaaccatctctcattatgagatgccgctcggtttagtgaaaaattatggcggctggaagaatcgcaaagtcatagagttttatgaacgctatgccaaaacggttttcaaacgctatcaacacaaagtgaagtattggatgacgtttaatgaaattaacgtagtgctccatgcgccatttaccggaggcggtcttgtttttgaagaaggagaaaacaaattaaacgcgatgtaccaggcggcacaccaccaatttgtggccagtgctcttgctgtcaaagcgggtcacgacatcattcctgattcgaaaatcggctgtatgatagcggcaacgacaacctatccgatgacttctaagccggaggatgtcttcgcggcaatggagaatgagcgcaaaacacttttcttctcagatgttcaggcaagaggcgcatacccgggatatatgaaacgctatctggcagaaaacaatattgaaattgaaatggctgaaggcgatgaagagctcttgaaagaacatacggtggattatattggatttagctactacatgtcgatggcggcgagcacagatccggaagagcttgcaaaatcagggggcaacctgctgggcggagtcaaaaacccttacctcaaatcatcagaatggggctggcagattgatccgaaaggcttgcgcatcacgctcaacaccttatacgaccgttaccagaagccgctgttcatcgttgaaaacggccttggcgctgtagacaaggttgaagaggacggcacgattcaggacgattacagaatcaactatctgcgtgatcatttaattgaagcgcgcgaagccattgcggacggcgttgaattaatcggatacacatcatgggggccaattgaccttgtcagcgcatctactgcggaaatgaaaaagcgctacggcttcatttatgtagaccgggacaatgaaggaaatggaacatttaaccgcatcaagaaaaaaagcttcaactggtatcagcaggttatcgccacaaacggagagagtctctgacaattttttgaaaactcatgcgcttcaattgacaataacgaaatgcaggcggacaataaaagagaaagatgaaccacccacagtccgaaaggcgggaagagcatgtttaacaaaatgttagtagcgattgacggatcagacatgagtgcaaaagcgcttgatgccgcagtgcatttggcaaaagagcaacaagcggaactaagcattcttcatgtggggagagaagccgtcgtcacgacttcttctctgacgggaattgtctatgtgcctgaacactttattgatgaaatcaggaacgaggttaaaaaagagggcctgaaaatccttgagaatgcaaaagaaaaagcagccgaaaaaggcgttcaagctgaaaccatttacgcgaatggcgagccggcgcatgagatactaaatcacgcaaaagagaaaggcgtcagcctgattgtagttggcagccgggggatcagcggcctgaaagaaatgatgcttggaagcgtcagccataaagtgtctcaattatcaacatgcccggttttgattgttcgatagatttgtaaaaaaagcgcccttgggcgcttttttttatttagaatagaagtgttataatatctacatgtaaaaaagaggaattctatgtgtagatttctgaattcacaaaaaacagtttatgctatgcagtattggaggtagaatacgtttgatgcaacaggatccttccatatcgtcaaaacaaaaatcaacagccgtaatcaaaatggtcatctctatggtgattttcggctccatcggctttttctcagagcataccaatctgccgtcatttgaattggtctttgtccgctgcctttgcgcgacgctgtttttaggcttttgctggctggcgtccggccagtataaaactgaaaaatggagcaagagagacgtgctgcaaacattggcgtgcggtttctttcttgtattcaactgggtgttcttatttaagtcttttgaagaaacgtccgttacaattgccatctctgtttatcatctagcgccggtgcttgttcttcttctggggagcttcttctacagagagaaattaaatgtgatctccgtcagctccattatcatctgctttcttgggactgcgctgatttccgggattaacggcagcacatcattgacacagctgatgggatcagggatcatatgggcagttctcgccgcactgttttatgcgttcaccactttattgggaaaaggcattcacaatctcagtccttacacgaccaccttcttgcagacaggtttaggggttatcatcctgattccgtttattcactttggcgcttttgcggacctatctcagggaaactggattatggtggtatctaccggcatcatccatacgggtattgtatatttgctgttttttgacagtttacgatttttatcaacgaaatttatttcaatcattgtatttctcgaccccgctgtcgcgatcgtgctcgataccgtcttcacaggcttccgccctgacctctatcaaacgcttggcatcgtaatgatctttgcgggcatggccttgacgcttgtcaggaggcaggggaaggcgaatgtgacagctgagggtacggatattgaacaaatacaataaaaaatgtaaaaaggcctatgcggcctttttttgttttaggtcaattgactctcgctaatccttaaaataagataaattttctagaaaaatattgtaatgatatttcagtctagttaagattattgagtaaatattacttttattacaaaaggagagaggaaatgaaaaaaagaaagaggcgaaactttaaaaggttcattgcagcatttttagtgttggctttaatgatttcattagtgccagccgatgtactagcaaaatctacagaagaagagaatggaaaccgtattgctgccgatgatccagaagaaactcttcagaaagaacaaactgaggaagctgtaccttttgatccaaaagatataaacaaagagggtgagatcacctctgaaagaacagaaaatacaaaactctattatgaaggtgacggtgtctataaacaggaagtataccttgatcctattcatacaaaggaaacaccggatgccgactgggaagacatttctcctgagttaaaagagtcgacaagcaaacaagtcgagacagagaacgctattttgaattcagattttcaaaagcaaatgaagaacgggctttatgcgacttttgagcataatgaccataaggttacatattcactagcagaagcgaaaggcccgaataaaacttcacttactccgaaagatacctcagcagattataagactgacagtaatgagattgtgtatccggatgtgtttccgaatattgatcttcagactttcacattcaatgaaaacataaaagaagatttagtccttcatcagtataatggatacaacacatttacatttcagttaaaaaccgatttgcaggctaaagaacaagaggatggatccattgatttttctgatgaaaaaggaaaagttgttttttctgtgcctaagccttttatgacggattcaaaactagatgagctttccggcgaggttgaacggtcagacaaagtcagctataagctggaaaagaatgaagaagggtatttgcttcatcttacggcagacgagaactggctgaaagacccagaacgcgtatatccagtatctatcgacccgtcaacttctttatctgtttcatcggatacgtttgtcatgagtgcctacccgacgacgaactattcggcctcctcacaaaaatgggatgctaatttaaaggcctatgtactgaaaacgggctattatgacaaaacaacaggcacaaactatgcgttcatgaaatttaacaacctaaagccaattcaaaatatgactgtcactaaagctacattaaaaacatacgtagcccattcctattatggaacaaaggcaaccggcctttggctggatacggtcaacagcaattatgataatgcaaaagtgacatggaacaccaaaccggcatctaaaaatatcggaaaagccgacgtccataaaggacagtgggcgagttatgatgtgaccgctgctgtaaagtcatggaactccggcggggccaactatggatttaagcttcatacaaacggaaacggcaaggaatattggaaaaaactaatttcttcagcgaactccgccaataaaccatatattgaagtgacgtataccattccaaagggaaacacacctacaatcaaagcctatcacaacggcgattccactggttatttcgatatcagctggaaaaaggttgaaggcgcaaaaggatataaggtatggatttacaatggtaaggaatatcaagcgatttctgcaggcaacgtcacgtcgtggagcacaaaaggtaaaaaaatctggcctacgagcgcagaaattgcctccaagagatataaactgcatctggacggcaaggatggagctgaattggcattagatccatccccggtctataagaattccggcggaagctatgctacaagcaaaaactattggattggcgtcagtgcgatatttgaccaaggtgaaggagcgatgtccgcaccggcaaagcccgttatccctaatgtaggaaaagcacaagcaccgtcagcaaagggctacaataatgggaatgccacaggatacttcgacctttcttggaaagctgtatccggtgcaaccggctataaggttcaggtgttcaatgggaaaggctttgagacacttgatctcggaaatcagacgtcttggaccacaaaagggaaaaagatctggccgacaagtgcagaaatcaaggcgggaaaatatgctcttcacctaaaggacggaagcggagcagagctgccgatcaatcccggaccaacctataaaaacgccgggggagatggagccaaaagaaattactcgtttaaaattatcgcatacaacaaagacggcgaagccattgcatccccggctgctaccccggcacttcctgatatcgctaggccaaagaatgtaactggctatttgtatacaaatacaaaatcgagtcaaacgggttatgtgaatttgatatgggaaaaggttcaaaatgcgaagggctataaagttaacatttacaacggtaaagaatatcagtcctttgatgttggtgatgctgatcattggacaacccaaaataaaaacatctggccgacttctgaggaaatcaaagccggaagctataagcttcatacagatggaaaaggcggggaattagccctcgatccatcacctgtctataacaatgcaaatgggaattacaaagggaagaagaattattctttcacgcttgtcgcctatgatgcgaatggtgaaacgattccaacggcgccctttaacccaacgttccatgaaggcgcagaattcctaggtacagaagagtactggtctatcattgatatcccaagcggccagttaaatggtgcgacaggcaatgtcattgtgaatgaagaagatttgtcaattgatggacgcggtccgggacttggcttatcgagaacctacaacagtcttgacagctctgatcacttatttggacaaggctggtatgctgatgcagaaacatctgtcatctcaacggatggcggggcaatgtatatcgatgaagacgctacgacacatcgattcacgaaaaaagccgatggcacgtatcagccgccgaccggtgtatatcttgaattaacagaaacagctgatcagttcatattaaaaacaaaggatcaaaccaacgcttatttcaataaaaaaggcggcaaactccaaaaggtagtggatggccataacaatgcaactgtctatacttacaatgacaaaaatcaactgaccgccattacagatgcatcaggccgcaagcttacatttacctatgatgaaaacggccatgtgacgtccatcacaggacctaagaataagaaagtcacctactcatatgagaatgatttgctgaagaaggttacagatacagacgggactgtcacaagctatgactacgatagtgaagggcgccttgtcaaacaatattcagctaacagtaccgaagcaaagcctgtctttaccgaatatcagtatagcggtcaccgtctcgaaaaagcgatcaacgctaaaaaagaaacatatgtctacagctatgatgctgataaaaagacgcttctcatgacacagccaaatggccggaaagtacagtatggctataatgaagcgggaaatccgattcaggtcattgatgatgcggaagggttaaaaattacaacgaatacaaagtatgaaggcaacaatgttgtagaagatgtagatccaaatgacgtcggcaccggaaaagcaacggaaagctatcaatatgacaaagatggcaacgttacgtcggttaaagatgcatatggaactgagacatacgaatacaacaaaaacaacgatgtcacaaagatgaaggataccgagggcaatgtcacggatattgcttatgacggactggatgctgtatccgaaaccgatcagagcggaaaatcatcgtcagcagctgtttatgataaatatggaaaccagattcaatcgagcaaagatttatcagcttcaactaatattttgaaagatggaagctttgaagctcaaaaatccggctggaatctgactgcctctaaagacagcggcaaaatttcagtcatcgccgataaaagcggagttctttccggatcaaaggcattggaggtcttgagccaatcaacgtctgccggaacagatcatgggtattcgtcagcaacacaaacagttgagctggagccgaatacaacctatacattaagcgggaaaatcaaaacagatcttgcgaaatcaagagcctattttaacattgatttgcgagacaaagatcaaaaacgaattcaatggattcacaatgaatacagtgcattagccggaaaaaatgactggacaaaacggcaaatcacttttacgactccagcgaatgcaggcaaagctgttgtgtatatggaagtcgatcataaagataaagatggcaaaggaaaagcatggtttgatgaagtccagctggaaaaaggcgaagtatcatcaagctataacccagttcaaaacagcagcttcacatcagcaacggaaaactggaatgtaagcggagcatccgttgattctgaagaaggctttaatgatgatgtatcattaaaagctgcccggaccagtgcgtcccaagccggatcagtaacaaaacaaaccgttgtcttagggcaaagcgcaaatgacaaaccggtttatctcacactgacaggaatgtcgaaagcaagcagcgtcaaatttacagatgaaaaagactattctctgcaggcgaatgtcacttacgctgacggcagcacaggcatctacaatgcgaaattcccttctggaacacaggaatggaaccgagcagctgtcgtcatccctaaaacaaagccgatcaataaagtcgatatcagtattctgttccaaaagagtgcgacaggcacagtctggtttgatgatatccgtttgattgaaggaagccttctgactaaaagcacgtatgacagtaatggcaactatgtgaccaaggaagaggacgaactaggttacgccacttcaactgattacgatgaaactggtaagaaaacgtctgaaacagatgcaaaaggtgaaaaaacaacctatacgtatgatcaggcagaccaattgacaaacatgacgctctctaacggcacgtctatccttcacagctatgataaggaaggcaatgaggtaagcaaaaccatccgggcaggagcagatcaaacctataaattcgaatatgatgtcatgggcaagcttgtcaaaacaactgaccctctcggcaatgtgttagcaagcgaatatgatgccaacagcaacctgaccaaaaccatttcaccaaatggcaacgaagtgtctctttcttatgatggaacagaccgggtgaaatcaaagtcgtataacggtacagaaaagtacattttcacgtatgacaaaaatggaaatgaaacgtcggtcgtcaataaagagcagaacaccacaaagaaacggacatttgacaacaaaaaccgtttaaccgaactgacagaccgcggcggcagccaaacttggacatatcctagtgactccgataagctgaaaaccttctcgtggattcatggggaccaaaaaggaacgaatcaatttacgtataacaagctggatcaaatgattgagatgaaagacagtacatcctcatattcatttgattatgatgaaaatggaaacgtccaaacctttattacgggcaacggcggcggaacaagtttttcatatgacgaaagaaaccttgtaagctcgctgcatatcggtgacaaaaacggcggagacattctgacggaaagctatgaatatgatgccaacggcaaccgcacaacgataaacagctcagcaagcggcaaggtgcaatatgagtatgggaagctgaatcagcttgtcaaagaaacccatgaagacggtactgttattgaatacacatatgatggattcggaaaccggaaaaccgttacaactataaaagacggctcaagcaaaacggtgaacgcttccttcaacatcatgaaccagctgacaaaagtcaatgatgaaagcatctcttacgataaaaacggcaaccgcacatccgacggcaaattcacatatacgtgggatgcagaagataacctgaccgccgttaccaaaaaaggcgaagacaagccattcgcaacatataagtatgacgaaaaaggaaacagaatccaaaaaaccgtcaacggaaaagtcacgaactacttctacgacggagacagcttgaacgtcttgtatgaaacagacgcggacaacaacgtcacaaaatcatacacgtacggagacagcggccagctgttatcctacacagaaaatggtaagaaatatttctatcactacaacgctcacggcgacatcatcgcgatctcagacagcactggaaaaaccgttgccaagtatcaatacgacgcatggggaaatccaacaaaaaccgaagcaagcgacgaagtaaaagacaatcgctaccgctacgcaggctaccaatacgacgaagaaaccggcctgtactatctcatggcccgctactacgagccaagaaacggcgtgttcctatcgctcgacccagacccgggcagcgacggagattcattggatcagaatgggtatgcttatggaaataataacccagtgatgaatgttgatccggacgggcattgggtatggcttgtggtaaatgccggatttgcagcctatgatggatataaggcatataaatcaggtaaaggatggaaaggtgctgcttgggcagctgcttctaattttggtcctgggaagatatttaagggtgctagtcgcgcctataagtttacgaagaaggcagttaaaatcacaggtcatacaagacatggacttaatcaatctataggaagaaatggaggccgtggagtcaatttaagggccaaactgaatgctgtgcgaagccctaaaaaagtaataaaacaacctaatggggcaacgaaatatgttggaaaaaaagctacagttgttttaaataaaaggggtaaagtaatcacagcttatggaagttcaagagctaagggttctaaacacgtattccatacacacggaaaaggaaataaatctaagagaaggcgttaataaggttaagcgagggggggatgacaactaccctcacttaaactttaaatgaggaggaaatatggccaaaataaaagatgattgtatagaacttgaattaacaccgagaaggtatcaagagttggacgatgatccatttattttatctgtatttgaattgttggaaaataagaaagccgtcgttcgcgatttttctgctgttttattagaaagtgaatataaggtgttgatatctgggatcgaaactatgataaaaggaaatcaagacagtatcagtttagagactattgaaccattcttatttcttagtattgatcaagaaaacggaaattacagaattaagattaaaattatatttgatgattataaagaaagtaagtcgaactccaacttgttcgaaattaattgtaatgaagaaaagctagagtcttttgtgaccgctttaaaattaaatcttgaaaatacaaaaaatccttctaaacttccttaattataaataatttctgcattggataaaaatggggcatttattgatggaacattaaataagagatgttaccatcctctcttatttgtatgacaaaagaatctaaaaatatagaattgattgggatgaagaggatttgccaaaaaggttcccagcgttttgtgaaaagcccactgggtgagttttaagcagttgaagataaagcttgtatcgataagcgatacaagcttttttagaacaaatctaaacatgaacgacaacgaaaacaagagaatgatgaatcaatttaaaagaagttgagaaattgacagcggagggaatgcggctcatgcaaaaaagattgatcgaaaaactcgccgagaataaaagacgtttattgatgagcgaaatcaaagaaaaactagtcccttgtgcagaaagaggcttcacttatcgttttgctgatctggcgcaaagcaggcaattgcttgagctggttttatcaaattcaataccagccaacacccgtgaggttgatgccctcgaaaaaacggaagcgaaacagctgatctggaaaatatctcagtcatatgttgcttacgatgaccgggacgttctgctgtttcatcaatacagcagcgaaattggtgcgttagtttgttcttttggaaaatgtctcgagcaccttgactgcttattggagtgtattgagttcgatgaagggattctcaatcatagttttattttggttgagcctaagtgccagtttggtttatgtatattgcacacggaatacggatgtgagcttgtttattggtagattggaaaccttttggaacatatcttttacggaaaaagcttcaatatctaaatatcagtacggtgctttgcatactaataaaaaatcatttagtacttgaatacgtggtgatcaaattgagcgagacaaatctaatagaatgcataaataaaatcaaaagtgtcttaaatggacaaacaacaagagaagaagtgtcggattgggctggaacttatgtttatgcggatgaccccgaagtagaagacgatagagtctgggatatgttaatccttctaagtgggattgatttgaaagattcatcagaaacttatttgcattcaacagatgatttaaatgattggatcaaacaatatacggagtaatttgttttctgcttggtggcaaggcgttattgtttaaaaagaggcaggggatgacaatgtatcaaacgattaatgaatgggttgattatatagataaggggtgcagtgtccttcatttagattttaatgtgtttaaaaaagaactctcacttgatattaaggtttttgaagatgaaggtgaatatacgcataaaatttcatttcaaaatgtggcatccgcttattatagtgcagatgttggcgacatgagattggaaaaaatagatccggaagaatacaattggcaagtatttgagatgagttatcatccagaaggaatcgggaatctatcaaattctataattccggagtatcaatcaaatgctaactttcttattgacatgaacagaatgctgattgctatagaagctgaaacagttcgctttgatgatcaatcgttttatgcataccaattaaacactaaatgatttaaggctgaattggaaagtagatttatcccaaaacgattaatgaaactaggttgtccgttactaatagctaataaatggtttattcttatcatttcatttcgaacctaggagcataaccaatgaaaaaattaaaattgaataaaatcatcaacgagaacacccaagattgttttttccatgctgatccacaggggcgtgtctacattggaaaagggttgaaaggtggtatcaccattacaatctatgatccttccggtgatgttcgggattttagagtgaaagagcagatttcatacagtgatattctgctctttcaacaatgtgcagatggctatgtcttcgtttattacgaatcgtacgagccgaaggtaaaggttttttcagaagagggaagggtgaaaagtgtttttcacttgccttcaggggtttcctgctgtcttttggattagaaacaacagctttgggtcggtttatgtgatgaagggatttatcatgatgagaatcccaacggccatagtgtgtggtgttttacgttagatggtcagcagaaggaaatacacattgatagaaagcttgaagaaatggatgcgcctgctgtagatgattgttatggacttgcagaaaaaaacggcttgatttatatgctgtattacggagatgcagtcattgccgcatttgatgaaacggtcgtgagacgggtgtggattctgtcggataaagagccggactcagaagcatttgatcagctcgcgatatccgaagaaggttttttggttgggacgttcaattgttacagtgcagaccttaagtcgtctctttatttgatttctgccgatgtgagtcaagagatggaagagataacatgctgtgattcgaacggtgaaggcctagatgttcaacagctgaaactgacaagttacgctgtttacgcagtggcctcttctggtgtttataagcaggatatccaataaggtgtagggatgagattatgatgaattggcgcgctttaagtcagacaaaacaagaccgcatctggtcagaagtgaacaagatcataaaatggaagcccggaagcagatgtcatcacatcatcccgcctgatccatatcgagtgtttgatatctcaagcgcgatgagcagtaaagctggtcataatgatgtgagcggagtgctaagtgatttagagacttctattttaaaagcatttcaattaggtactggaaagaacgatgtaatgtacgcactagattggcagcatgacggatatacctttagtcctcatcaggcaatgcctaaggatgaatttggcgaatggcctgttcccgtatttccaaatggagactattatttcttttttcatcaggacttctcctggggacttttgggagacccgtggaaatgtgcaatcactgtgtttggtgaagagctgttggaggcgatagataatgatccgcctattctgtttcgaaataaatgagattattgcggaagggagaggatcaacgtgcttcaaaaactgagaaaaagacagcgagagcttgaagaaaagcagtaccctgatgaattgtacggctttgaagcggaaatctatgagttttttatgcttgttgctggcagtttggattatgtgctggcgaataaaaggataccccggcatcagcggcgttcgttggagaaaagcttttttgagctgtatcctgacatacttccggatatgatcaaaaacgataaggatctgtatcatcacattctcttgtatgaacaagtcagacaagagatttgcgttgcgctatccaactgataaggggaagattttatggaaataacctctataagcagtattggcaatttggacatgatcgagcttaagcctgaccaaaccgttatggcatgcgaacttgaagatgcagagtcgttttatcgtttttgggcagggcttgcctacgatcgaatcatgatacaggtaataacgactggttcatttatagaagacctgtccgagtattttgaaggtcatgcttacaaggtgacgaagctggccaaaagggaattccatttccaatccatattacaggaagcagaccgggatattgcagattttctctttctgctagcttccatcaatgatgatgtttttctgatcactgatcctcaaccggataaaagctatttttcagaagggaagctccaatgcctaacggactcaggcgaacggatcatatggtttgaatacgatgctgtggacatttatatgattggcggtgaatcatataaatagagggaattcatttgaatatcacacaatacgagaaattgaaacagcatctttctgatgaggatacaggtccatttacattaaacgagttttctttctatatgaaagaagatgatcgttatattcatattcctgtgtttgaatgaaaacgatctgctcaaacctgtgacattcaattgcggtttgaaaacattagtgcatcaaagctggatgaccttgaatccatcgattcggttgcattggagattgtaccgactgacgatcaatgggaaagactccgttattatgtgtatgacgaagaaaaccaaataagcttctattgcggaggttgggatgtgatcaagtgtgacaagaagtcacactgattttccccttcttgagactctcccctcatttttattcctcaacgcaatttttttcttaattcagtcatcataaagaaacaatcaccgagtatgcattaatgtattcgttttcatagagggggagtcttgatgaaaaaatggatggcagcggtttttgtgatgatgctgatgctgtgttttggcgggattgagaatgtgaaggcggcggagccgaaggtgtatcagtttgactttggaagcggttcgatggagcctggttatattggtgtcagggcgtctgatcggtatgaccggtcaaagggctacggttttcaaacaccggagaatatgagggatgtggcggcatccggggctggtgtgaagagtgatgcggttcagtttttagcgtatgggacgaaaagcaataacacgtttaatgttgatctcccgaatggcctttatgaggtgaaggtgacgcttggcaatacggcaagggccagtgtggcagcggagggcgtgtttcaggtcatcaatatgacaggggatggcgcggaggatacgttccaaattcccgtcaccgacgggcagctgaatctgctggtgacagagggaaaggcaggcaccgcttttacgctcagcgccttgaaaataaagaaattgtctgatcagccggtaacgaatcgaaccatttatgtcggcggcgactcgacggtgtgcaattattatccgctcaacagcagcaagcaggcgggctgggggcagatgctgcctcactatatcgataaacacacctttcaagtgagaaacatggcgtctggcgggcagatcgcgagagggttcagaaatgatggacagcttgaggcgattctgaagtatattaaacccggagattattttatgttgcagcttggcattaatgacacaaatccgaagcataaagaatctgaagcggagtttaaagaggtgatgcgtgatatgattcgtcaggtaaaagcgaaaggagcggacgtcatcctatcaacgcctcagggccgggcaaccgattttacttctgaaggcatccattcgtctgtaaacagatggtacagggcctctattttagctttggccgaagaggaaaaaacatatctcattgacttaaatgtcctcagctcggcatactttacatcgatcggtccggaaagaacactcgggctttatatggatggagatacgctgcacccgaatcgcgcgggggccgacgcactggcgcgattggctgttcaggagctaaaacgccagggaatcgctggcttttaatacatcatttttcgacaaaacacatatgccttggtcaattagagtataatgagaacatctgcaagagacaggagtttatacatgagtcattttaaaaactatcaaatcagtcatgacattttacgagcattggaaggactgggatatacagaaccgaccaaggtgcagcagagtgtgatccccgctgcccttgaacgaaaggatcttgtcgtcaaatcacagacaggaagcgggaaaacggcttcgttcgggattcctctctgtgagctggcgaattgggatgaaaacaagccgcaggcgcttattttaacaccgacccgtgagcttgcggtgcaagtaaaggaagatatcacgaacatcggacgatttaaacggatcaaagcgacagccgtatttggaaaatcctcctttgataaacaaaaagctgagcttaagcaaaaaagccacattgttgtcggcacgccgggacgtgttctggatcatatcgaaaaaggcacgctgccgttggatcgtctctcttatttggtcattgatgaagcggatgagatgctgaatatgggcttcattgagcaggtggaggcgattatcaagcatctgccgactgagcgtacgacgatgctgttttcagcgacgcttccgcaggatatcgagaagctgagccgtcaatatatgcaaaaccccgagcatatcgaggtcaaagcggccggcctaaccacaagaaatattgaacatgcggtgattcaagtaagagaagagaataagttttcattgctgaaagatgtgctgatgacggagaatcccgacagctgcatcattttctgccgaacgaaggagcacgtcaatcagctgaccgatgaattggatgacttgggatatccatgcgataaaattcacggcggaatgattcaggaagaccgattcgacgtcatgaatgaatttaaacgtggcgagtaccgttacttagtggcgacggatgtcgccgcgcgcgggattgatattgaaaatatctcccttgtcatcaactatgatctgccgcttgaaaaagaaagctatgtccaccgcacgggccgaacgggacgcgcagggaacaaaggaaaggccatttcgtttgtcacggccttcgaaaaacggtttttagccgacattgaagaatatatcggatttgaaatccaaaaaatagaagcaccttctcaagaggaagtggcaaggaagaaaccagaatttctagctaaactgaatgaccgtccggaaagcaaaaaggacaaaagcgaagagctgaataaagacattatgaagctgtattttaacggcggaaagaaaaagaaaatcagagccgttgattttgtaggaacgattgccaaaattgacggtgtgtcagctgacgacatcggcatcatcacgatcatggataacgcctcatacgttgagattttaaatggtaaaggccctcatgttctcaaagtgatgaagaacacaaccgtcaaagggaaacagctgaaggtgaataaagcgaataaatgatgaatgacctgctcccagttaaaggggcaggtcattttgctgctggctgacatctgtgctggtttcctcgggaacaaaggcaagaatcacaataccaatcacaaacaaaatgatcaggctgaacaccgcagtcgaggatttaccggtcagctgggcggtaacggcaatgagcagcggccccataattgaggcgaattttccaaaaatgttgtagaagccaaagaattcattggcgtggcgctttggcacaagcttggcgaaataggaacggcttagggcttgaataccgccttgcgaggtggcgacaagcatagccagtatccagaaatcaagcgttgtctccataaaataggcatacacgcagacgatcatataaatgacgatcccgacgtacagcatggtcttccccgtgaagcgttctgccagttttccgtatataatcgaaaacggcgcggcgactacctgggtgacaaataggatgatcagaaggcttgaggagccgatccctaaatctgatccataggatgtcgacatcgtaataatcgtgccgactccgtcgatataaaagaaataagcgagcaagaagaggaaaagtgcccggtattgcctgatccgtttcatcgtttggccgagccgcttaaagctgttgatgacaatatgaggttcttttttgatgtaatagcgttgatggacatgtttaatcattgggatggtgaacagcccccaccaggcagccgttatgaagaaggacagctggcttgcggccgatacagacactggaatagtctctgcttgtgcgagcaggatgacagcaatactgatgataaatggaatcgtgcttccaatgtatcctaagccaaaaccccgtgccgagacgagattcatccgcttctcaggcgtgacgtccacgagaaaggcatcataaaacacattggcgccggaaaaaccgatagccgataccgtataaaacagcaacaatagcagccaatgttcactagggataaaggcgagcatcgcggtgctggcgacaccggctgacacaaagaaaccgaagaactttttcttgcacccttcatagtcggcgattgtgcctaaaatagggccgagcatcgcaagaataaacgttgaaatcgcaatggtatagcccagataggcagtcgattgagcggcgctgacaccgctttccgcagctgctgatttataaaataacggaaataccgcggtggtcacgacaattgagtaagctgaatttgcccagtcatataacacccagctgttttcttgtttcgtaaaacgtttcatcatcagagcccctctccggtaacgatacttctattgtacgagaaatgggcctgaaaagaatggaatgcacgtcaatttttacaaaatatttatgttttttcgcttcaaatcatacttttgatttattgctggggttaggtgcatctggtaccatttaactatattttatggtattttccagaagggattcagcagagaggagacagagcatgaggcgaataggcttgtgtataagcctgctggtcacagttcttgtgatgagcgcatgcgaaagtgaaggtgaggctcagatgttcgcagactgtgatcaaaagacagtaaaacaaaccgcagccaaaccgatgagcagtaagaaaaagcaggatttccaagccctcgcaagcgacaggcagctggccattgtgttcagttccatgatacaagtgagcgaagcatttgattatggaatcggcaatccagaatacttcgtgcgaatcagcatgactgaagaagaagcagacattgcgaaggagaatctcgaatcgattaagcttgagaacaaatcgctcaaaaaacaaaacagcgaggcggttgccttgcttcaaaaaacgcgtaatcaagatatgagccgcatcgaaattcagcagctgacagaaaatagagccggtttttttgagaccgcagacagtatgatcaaactcatcaaccaagtcacaccgaaaaacgcgaagaagacaagacagcagctggatcagctgaaaaaacaatatacacaatacagtgctgaaagcattaaaatcatgaacagcattgtcaaaaagcagaaagctgacaaggcatcatttgaacgccatctggaggcgctgcttcaaaaacagcccgggcagcaggtacggagtgaattgtactgaccagcttccgtctttccctgatgatattgacctagtacaaaaagaatgtacaatcaagatatagtctgttcttagtagatttggagggacatgccatgaaaattgcgaaggtgatcaacaataatgtgatcagcgtggtcaatgaacaggggaaagaattggtcgtcatgggcagggggctcgcgtttcagaaaaagtccggcgatgatgtcgatgaagcccgcattgagaaagtgttcacgctcgataacaaggatgtatcagaaaagttcaaaacccttttgtatgatataccgatcgagtgtatggaagtatccgaagagattatcagctacgcaaaattacagctcggcaaaaagctcaacgacagcatctatgtgtcgctgaccgaccatattaactttgccatccagcgcaaccagaaagggcttgatatcaaaaacgccttgctgtgggaaacaaaacggctctacaaagacgaatttgcgatcggcaaagaagcgttggttatggtaaaaaacaagactggtgtgtctctgccagaggatgaagcaggctttattgctctgcatattgtaaatgccgagctgaatgaagagatgcccaatattatcaacattacaaaagtcatgcaagagattttgagtattgtaaaataccattttaagattgaattcaacgaagaatcgcttcactattatcggttcgtcacccacttaaagtttttcgcgcagcgtctatttaacggcactcacatggaaagccaggacgattttttgctggatacagtgaaagaaaagtatcatcgcgcgtatgaatgcacgaagaaaatccaaacctacattgagcgggagtatgagcacaagctcacaagtgacgagctgctgtatttaaccattcacatagaaagggtagttaaacaagcataatgagagcgctgacatttgtgtttccttgtgttcactttttcttacattcacatatgaaaatggtaggattgttactgataaagcaggcaaaacctaaattgcaatgagtgcggatcatctctgtctgtgctgatggtaatttaggtttttatttttttcagagggaagatgatgatagttacaggattcaagttagtaagattcgatattatcattattttgaccgatgttcccttttaaaagaatcatgtaagatcaacatagaaaacgctttcaatgaaaggggaatgccaatatgccttatctgaaacgagtgttgctgcttcttgtcactggattgtttatgagtttgtttgcagtcactgctactgcctcagctcaaacaggtggatcgttttttgacccttttaacggctataactccggtttttggcaaaaagcagatggttattcgaatggaaatatgttcaactgcacgtggcgggctaataacgtatcaatgacgtcattgggtgaaatgcgtttagcgctaacaagcccagcttataacaagtttgactgcggggaaaaccgttctgttcaaacatatggctatggactttatgaagtcagaatgaaaccagctaaaaacacagggatcgtttcatcgttcttcacttacacaggtccaacagatggaactccttgggatgagattgatatcgaatttttaggaaaagacacaacgaaggttcaatttaactattatacaaatggtgcaggaaaccatgagaagattgttgatctcgggtttgatgcagccaatgcctatcatacgtatgcattcgattggcagccaaactctattaaatggtatgtcgacgggcaattaaaacatactgcaacaaaccaaattccgacaacacctggaaagatcatgatgaacttgtggaatggcacgggtgtcgatgaatggcttggctcctacaatggtgtaaatccgctatacgctcattatgactgggtgcgctatacaaaaaaataatgccaaatgtgaaagagcctgctgcaatatagcaggctcttatgattgtaatgagaagttgttggcatgaatcttctattcactcataatatcctatttgatcttctcccctctgtaaatcacgtactcactcaatgctacgatcaagctcatacatttagaaagaaataatcccaatcaaaagcgccgcaatggtcatcacaatcgttgttcccacggcccatttaatagtgaatttttgatggtcgccaaagctgacgcctgccattcctaccaatagataggtggaaggcacaagcgggctgagcagatgcacaggctgccccagcaaggaggccctcccgatttcagcggcgtctattccgtaagcggaagcggcttcggcgatgatgggaaggacaccgaagtaaaaggcgtcattcgacatgaaaaaggtgaagggcatgctgacgatcgcagtgatcaacggcaggtgcgggcccatggcatcagggatgagtgaaacgagagaatgcgccatggcatccaccatttttgtgccggagagaatgcctgtgaatatgcccgcagcaaacaccattgagacaacgtttaacgcattacccgcatgcgccgagattcgtttctgctgctctttgacatttggatagttaaccatcaaggcaacggcgaacgcagtcataaaaagaacagggagcggcagcaggctggtgatcagtgcggccatcagagcgacagtcagcagcaggttaaaccattgaagagcgggacgcttgagcggtgcggcctccgggtcggaagacggtgcgtgatcaatcgaaatgacgccgagccgcttccgctctttctttccgaggatataagcaacggcgatcacccagagaatgccggcgatcatagcgggaatcagcggtgtaaagacctctgacgtgtccaattttaaggaagccaaaaccctcgcagtcggcccgccccacgggataatattcataacccccgaaccaagcatcgctattcccgctaacaccaaacggttcatgccgagccgtttgtagagaggcagcatcgctgcaatggtaatcatataggttgttgtcccatctccgtccagcgaaatggtcatggtcagaaccgctgtgcctacggcgatttttaacggatctcctttgacaaacgataagattttggcaatgagaggatcaaacaggcctgagtcaatcataatgccgaaatacaggatggcgaataacagcatgataccggtaggggcgaggtctgtaacgccctgaatcatcatctcgccgagatctttgccaaatccgctgatcagggcaaacacaataggaacgacaatcaaagcaataagagcggaaagccggttagacataataaggtacataaagacaatcatcatcacaaaaccgagtatggcaagcatgatatgacctcccctattcaacagcttttttggtaagcgcttccatcctttctttctgtgaagaaggcttatttcaaatgtgtatgaccgcatatttatatgtagaccaaaaatcctaatgagcggattagcagtttatatgaagaacgccacgggtaaatgtgctgtagaatgtttcgttttaaaaagggggagcagacatgagtgatgaccaaaacaaacgtgtaaatgaacactcaaaggacgagcagcttgagcagtacaggaccgataacagcgggaagaaaatgacgacaaaccaaggcttgcgagtgtcagaggatgagcactcgttaaaagccggggttcgcggcccgacgctgatggaggattttcatttccgggagaaaatgacgcactttgaccatgagaggattccggagcgcgttgtgcatgcgcgcggatttggcgtgcatggcttttttcaggtttacgaaccaatgacggaatacacacgggccaaatttcttcaggacccttcggtgaagacaccggtatttgtccgtttttctacggttgcgggttctaaaggctccgcagacacggtgcgggatgccagaggctttgcgacaaaattttatactgaagaaggaaactatgaccttgtgggaaataacattccggtgtttttcattcaggacgcaatcaaatttccggatttggttcacgcgtttaagcctgagccacacaatgaaatgcctcaggctgcgactgctcacgatacattttgggattttgtcgccaataaccctgagtctgcccacatggtgatgtggacgatgtctgacagaggcatcccgcgcagctacagaatgatggaaggcttcggcgttcacacgttccgttttgtcaatgaacaaggaaaggcacgtttcgtgaaatttcactggaagccggtgctcggcgtgcattctctcgtatgggatgaagcgcaaaaaattgccgggaaagatccagatttccaccgccgtgacctgtgggaaacaattgaaaacggcggcaaggttgaatacgagctcggcgtgcagatgattgatgaggaagatgaattcaagtttgattttgatattcttgacccaactaagctgtggccggaagagcttgtgccggtgaagatcattggaaaaatgacgctgaaccgcaatcaggataatgtgtttgcggaaacagaacaagtcgcattccacccgggaaatgtcgtgccgggcatcgattttaccaatgacccgctattgcaggggcggcttttctcttatacggatacacagctcatccgtcttggcggcccgaacttccatgagattccgattaaccggccggtctgtccattccataacaaccaatacgacggctatcaccggatgacgatcaataagggacctgtcgcttatcataaaaactcactgcaaaacaatgatccgtcgcctgcgacagctgaagaaggcggctacgtccactatcaggaaaaagtcgagggcaaaaaaatccgccagcgaagcgacagcttcaacgattattactcacaggcgaagcttttctggaacagcatgtctcctgtggagaaacagcacatcatttctgctttctgcttcgaggtcgggaaggtcaaaagcaaagacgtacagcggcaggtcgttgatgtcttcagcaatgtcgatgcagatttagcagaagaaatcgccaaaggagtaggcgtggcggcgcccgcgaagcgtaaagcatctaaagaaattcttacttcgcctgcgttaagccaagcccgtacagtgaaaaccgcgtcaacaagaaaagtcgctgtactcgccggaaacggatttcatgaaaaagagctgcaaacagtactggaagccttaaagcaagaaggaatcacagtggatatcatcagtcaaaatctggggtatatgacaagcggcagcggacagcagcttgaggccagcggcacgttcctgacggttgattctgttctgtatgatgccgtctatgccgcaggaggactggagttaaaagacaacaaacaagcgatggcgtttatcagagaagcttacaatcactacaaggcgatcggtgcggcaaatgaaggaattgaccttcttcaatcctctgtcgggacaacagaggggctaggcatcgtaacggctaaagatgaacctgactacaccgctttcagcaaggcatttatcgatgcggttgctgctcatcgccattgggatagacgaatttgatcggctcctgtatctttaaggaagatacttttcataaggagcatgacaaatgaacgaaaaacagctcactgaagcttacgaacgcgatgaaaatatgatgattttggtgtttgcccagtggtgcgtgaaccatgatcttgatccgatggagctgtacgccaaagcgtatccgcagcaaaagctgaatgaaagcttgaaaaaaaccatggacgatctggtcgtgccaaaacacgaagcagagcacattccggaccagactgtcattgcggtattagagatgttcggaaatacagatttggcacaagcccttcatgaagcgatttctgggcgcaaacagtaaaaaaagagacatcctgtgtctctttttttattggaaaaatcatgctgttagacctagaaacttctttcgatttaatcagtctataaaagtgtgtattgcttaaataagggaatgataaacaacgacatcaaaggagtagattgtatgaaatggaataacatgctgaaagccgcgggcattgcagtcttgcttttttctgtatttgcatatgcggccccatctttaaaagcagttcaagcgaaaacaccgactgtcagcacccatacgtacaaaaagatcaaggagttaacgtatccacaagtgcatcacgtcgggaatgccgcgtttgaaaagaaaatcaatcaagagctgaaagcctacatgaacaatcgtatcaggaatacctgaaaaacaaaaaagcaggcgaacagcagggctttaaaacgggaatatcaaacatccttcagcgtcaaatacaatgcggcaggcaagctcagcattcaaacactcaattatatctattcagggggcgcccacggtctaacgtctgtccagtccttcaactatgacttgaaagcacaaaagcgggtgacgctggatcagattctgaacaccaaaacaaaagtcagcaaaacgagagattacctatatagctatatcaaaaaacacgatgtgctgtttttctctgatgtaaagaaagaggatataaccctaaacagagacacaatgttttactttacggcaaacgggatcgccatcgtcttcggccagtatgacttggggccttatgcagcgggaatccgggatgtgcaggtgccagcctctatttatcaataatgaaaagagccatatccgaaaagggatatggctcaatgtttctaccacacaaacaggccgacaatcgcagcacttaataaagataccgcaattccgctgacgagcagtttccacacgtttctcccgatgaccgttgacttttctccgtcaaggatcgaattgtacgtgccgtaaatcatgccgacagtactgaagtttgcaaaggacgtcaggaatgtcgtcgccaccgcaacggtgtgaggcggaagggatttgagattgtttttcaagtcaagcatcgcaacaaactcgttcgttgctaatttcatgcccatcagctgagcaacatacatcgcatcgtgcactggcagtccaagcaggaatgcgaacggactgaacagataagcaaaaattgtctggatggtcaggccatgtacgaaaacgccaagaatgccattaactgctgacgttaatgcgacatatccgatcaccattgccaaaataacgataaccatgttcatgccgacaagcatactgttagaaatcgtagagaaaaagtctttcttctcttctttaggcggtgtatagatgatatcttcatcctccggcacgtgaacaggattcagcaggtttgcgataatcagcgcgtttaagcagttcaaaggaatggctgtaaacacgtatgtcgcaggcaccattgaaagataagatccgataatggagccgctgatgctgctcatgctcattaaaccgaatgtgagcaggcggttgttgcttaaaaccgtaagctgctggcggatgaccgcaagtgcttcggtatttccaaggaacatcatttgaatagagaaaaagctttctaatttcggcaagcgggaagcctttgaaatcacccatccgattttatcaatcagccaaggcaaaatgccgaaatacgttaaaatatcaaagaatgtgacgataaagataattggaagaagcgcactaaagaaaaagtctactgtttcattcgccatcactgacggaaaggcaaacgcgataccgtcactggcgcaagcaatcagccaagtgaagaaatcaccgattttaccgatggcccagcttccgacttttgttcccagcataaaccaagtaatcagcaattccagaacaattaacgtaatgatcgggcgccacttgattttctttttctgcggagaacataggaatacaactgccataatcacaatgagaccgacaaggtttagtaaaaagtacatgatagcaactcctatgagggttattatggaaacaaaaaaagctcttatccttcacaaattctggaagtgcagaaagtgtgaaaaataagagcaaacagaaaagaacttgtccttttcaactcgttcaaatttattcaaactttcttgtagtctagttttttacggttactaggtagaaacaatcagaccatattactgatcatatacaagaatgtctttttctaagatgatagcagtattttatcctttcactttttgaaaatcaacctttttaactattttcacaataataaaatttatattctaaaatgagaaaataaaggaaaaacatgctggattgctatgctgatatgatgttggcgggataccagcatgtcagtactgatttttcttcactataaggttccagctcctggatatttgttgtatgatggaaacggggaaacccatacagcagaaagggagtttttttcatgattatccaattcattcgttatagataatgacaggtgtagacaaactgccagacctggccaatttttgagataggcctaggtttatttgtctatgcctttttcatttatctaaaaatgaatgaatggggtgttttttatcatgaagcgaacagttgatttcagcatgtttcgatgcccgctctgcgattcttctatggatgcggcatcagggaaaagcttgatttgtacagaacgaggacatacatttgatctatctcggcacggctacgtgaactttctgacgaagccggtcaaaaccagttacggtgccgagctttttgaagcgaggagcaggctgattggagaatgtggtttttttgacccgctccatgatgcgattgcagagctcatcagtcatcccaaatctggtcatgaggcattcaccatcttggacagcggttgcggtgagggttctcatttgaatgcgctttgcgggtttgattatgcagggaaagcagcgataggaaccggcatagatctttcgaaggacgggatcttaaaagcttctaaggcattcaaagatctgatgtgggcggttgccgatgtggcgcgtgctccttttcatgatcgccaatttgatgttgttctgtctattttttcgccgtccaattatgcagagtttcatagactgctgaagaatgatggcatgctcataaaagtagtgccgcgaagcgactatttaatagaattaaggcaatttttatatactgattcaccaaggcgcacgtattccaatacggcagcagttgagcgttttacagcaaatgcagcacacagccgtcctgtcaggctgcgctatgttaaaacgcttgaccagcaggcgatccactggcttctcaagatgacgccgcttgcctggtcggcgccgaaagatcgagtcagcctgctgaaagagatgaaatcagccgatattacggttgatgttgatatcctaataggaatgaaatgaatggtagaggaaagctccgaaaaaaggagctttccttttttaatcggaatagttggcccacgcttctcgtacatatggaaaggggacggaaacagccgatgcggacaggtttttgtaaacgctttctagttcgcggaaacgggggatgtgtgtgtggaactgatcatcattctattggcgttaggtttgctgatgtttacggcgtatcggggattttctgtcatattgtttgcgccgatttgcgcgttattcgcggtgctgctgacagatccaagccatgtgcttccttttttttcatcaatttttatggagaagatggcgggttttattaagctgtatttcccagtgtttttgctcggtgctatttttggaaaggtcgttgaaatggccgggcttgcggcatcaatcgcgaaaacaattgtccggcttgtcggggcaaaaagagcgatacttgccattgtgctgatgggtgctgtcttgacgtacagcggtgtcagcctgtttgttgtcgtatttgctgtatatccttttgcgaaaaacatgttccaagaagcaaacataccaaaacgcctcatcccgggtacgattgctttaggagcttttacgtttacgatggacgcacttccgggaacgccgcaaatccaaaatgtcatcccgacgtcgtttttcaaaacagacatttatgccgccccttggctgggtttgatgggcgcagtgattgtgctggcagctgggatgctctatttggaatcaaggcggaagaaagcgcaggcatctggcgaaggctatggcggttttgattcgcagaatgctcctgctcctgaatcgattgagtccgcggctgaaccggacaaaagcccgattcggcacgcgcttgcctttgtcccgcttattctcgtcggtgcagtgaataaatatttcaccatttacctgccaaagtggtatccgaatggatttgatttttcttccataggattaaaggagttcggcaggcttgatatttcttcagcggctgctatttggtcggtggagattgctttagtgattggcatcatcacaacgatattatttgattggagaagtgtgtttgcccaattgaaggaagggctgaatgaaggaattggcggcgccttgctggcatctatgaatacgggtgctgagtacgggttcggcggcattatcgccgcgctgccggggtttcataagctgagcagcggaatttcacatacttttaccgatccgcttgtaaatggcgccgttacgacaactgcgctggcgggaatcaccggctcggcttcgggaggaatgggcattgcgttaagcgcgatgtcagaacaatacttacaggcgattcaggcttacaatattccgccagaggtgatgcatcgggtcatttcaatggcatcaggcgggatggatacactgccgcataatggcgccgttatcacgcttctggccgtgacgggtttgacccaccggcaatcctatcgcgatatttttgcgatcacgctcattaaaacggctgccgtatttgctgtgatcgcgatttacagcctgactggtctagtgtagaagaaaacgaaaggggcatcaatatgggaaaagtgctgtcatcaagcaaggaagctgcgaaactgattcatgatggggatacgctgatcgcgggagggtttgggctgtgcggcatccctgaacagctcattttgtctataagagatcagggagtaaaggatttaaccgttgtcagcaataactgcggagtcgatgactgggggcttggtttgcttctggctaacaagcaaatcaagaaaatgatcgcttcctatgtcggtgaaaataaaatttttgagcggcagtttttaagcggagagcttgaggtagagcttgttccccaaggaacgctcgctgagagaattcgtgcaggcggtgcaggcataccgggattttatacggcgacaggcgtcggcacctccatagccgagggaaaagaacataaaacattcggcggccggacttatgtgctggagcgaggcattaccggcgatgtggcgatcgtcaaagcgtggaaagcggacaccatgggcaatttgatttttaggaaaacggcgagaaatttcaatcccattgccgccatggcaggcaagatcacgattgccgaggcggaagaaatcgtggaagcaggagagctcgatccagatcacatccatacgccgggaatttacgtacagcatgtcgtgcttggcgcgagccaagaaaaacggattgaaaaacgaacagttcagcaagcatcgggaaagggtgaggccaagtgaaggaagcgagaaaacgaatggtcaaacgggctgtacaagaaatcaaggacggcatgaatgtgaatctcgggattggaatgccgacgcttgtcgcaaatgagatacccgatggcgttcacgtcatgcttcagtcggaaaacggcttgctcggaattggcccctatcctctggaaggaacggaagacgcggatttgatcaatgcgggaaaggaaacgatcactgaagtgacaggcgcctcttattttgacagcgctgagtcattcgcgatgataagaggcgggcatatcgatttagctattctcggcggaatggaggtttcggagcagggggatttggccaattggatgatcccgggcaaaatggtaaaagggatgggcggcgccatggatctcgtcaacggggcgaaacgaatcgttgtcatcatggagcacgtcaataagcatggtgaatcaaaggtgaaaaaaacatgctcccttccgctgacaggccagaaagtcgtacacaggctgattacggatttggctgtatttgattttgtgaacggccgcatgacactgacggagcttcaggatggtgtcacaattgaagaggtttatgaaaaaacagaagctgatttcgctgtaagccagtctgtactcaattcttaatgggaaggtgtttgacatgagaaaacaagtcgctttggtgacaggggctgccggcggaatcggattcgaaatcgcaagagaattcgcccgggaaggtgccagcgtcatcgtttcagacctccgtccggaagcatgtgaaaaagcagcctccaagcttgcagaagaaggctttgacgcggcggccattccgtatgatgtgacaaaggaagcgcaagttgctgatacggtgaacgtcatccaaaaacaatacggccgcttggatattctggtgaacaatgccggtattcagcacgtcgctccgattgaagagtttccgacagacacctttgaacagctgatcaaggtcatgctgacggctccctttattgcaatgaagcatgtttttccgatcatgaaaaaacagcagtttggcagaatcattaatattgcgtctgttaatggattagtgggctttgcagggaaatccgcttataatagcgccaagcacggcgtcattggactcacaaaagtaggggcgctggaaggcgcgccccacggcataacagtcaatgcgctctgtccgggttatgtcgatacccagcttgtacgcaatcagcttagcgatctatcgaaaactagaaatgtcccttacgactctgtacttgaacaagtcatttttccgcttgtgccgcaaaagcgactgctttccgtcaaggaaattgcggattatgccgtgtttttggcaagcgagaaggcgaagggcgtcactgggcaggctgtcgtccttgatgggggctacaccgcacaatgacataaaaaacacacttgctccgctagggaatcaagtgtgtttttttctttgcttatttccaaacatcattagcgatctcaaccacatggcggagcttcgcccattgctgttcttcagtcagcttgttgccttcctcagttgaagcgaatccgcattgagggctgaggcaaagctggtctaagcttacataacgggacgcttcttcgatacggcgtttcacgtcatccggattttcaagctcaccgaatttagatgtcactaagccaagaacaagctgaagatcagaccgttttacgtaacggagcggctcaaatccgcctgagcgtgaatcatcatactctaagaaaagtccgtcaagattcaagccgtcaaaaatggtttcggctgctgcgtcatagccgccttccgctgtccaagtggactggaagttgccgcggcaaatatgcatggttaccgtcaagtcatccgggcggtctgcaatcgcgtcgttaatggatttcgcaaacagctggcgaagctcgtcaggcgttgttccgaacgcttcgatttgttttaagcctttttctgataagaaaacggcccacgctgtatcatcaagctggaggtagcggcagcctctgtcataaaacgcttgaatcgcttttttatatgctttggatacatcgtgctggaaaagttgataatcgtttttgtattcatccttttccagttttccgcggaaaaacagcatattcggacttggaatcgtcatctttggcgtcgcgtcaccggcaatgctatggagaaatgagtaatcttcaagcattgggtgagttgaaaagtcgatatcgcctgtgactttaatgccgcgtgcttttgtctgtacgttatggaattgaatgccttgctcaggagtaaacggctcaacgccatctaagttttccaggaaatcaaagtgccaccatgctctgcggaattcaccgtctgtcacgacgttcaggccggtttccttctgtttttccacaatgcggatgatttcgtcgttttcaatttggcgaagctgctcagcggtcatttcgccggccgctttttgcagccgcgcttttttgacgggctcagatcttagcaggcttccgacttgatccgcgcgaaacggcggtttttttctttgaagtgatttttgttctgcgggtgttgtttgttgtgacatgttgtccattccttctttccattcaaatataaaaaagctcttcctttggataaggaagagcttgcgtgacaatctcaaccttatcttcaagagcaatcattgctctaaaggatttagcaccattctgttaaacagcggttgccgggtatcgcagggccagtccctccacctctcttgataaggaaaacctttttattaaattttctgatagtatctattattcacacattttctatttctgtcaatgatagattatctccacacatcgttggcaatgtcgatgacatggcgcagctttgcccattgctgctcctctgtcagaaggttgccttcttctgtagaggcgaaaccgcactgcgggctcaggcatagctggtccaagctgacaaaacgcgcggcttcattgatacggcgtttcacatcctcaggattttcaagctcgccgtatttcgatgtgatcaagccgagcacaatttgcagatccttgcgcttcacaaaacggagcggatcaaagtttccggagcggtcatcatcgtattccaagaaaaggccgtcaaggtttaagccgtccaaaatcgtttccgctacagcgtcgtaccctcctgatgccgcccaggttgagcggaagttgccgcggcaaatgtgcattgtgatcgttaaatcgtcaggccggtctgcgacggcatcgttaattgttttggcaaatatggctggcaatgtttctggatcaccgccgagcgcccggacaacctctctgcctttgtcctcaaagaagagagaccatgacgtatcatcaagctggagataacggcagccagcatcatagaaggctttgattgcttttttgtacgcttgggccatatcatgaaagtattcctcttgatcgtcataaatccctttatccgccttttcgccaaaaaacagcatatttggactgggaatggtcaattttggcgtcgcgttaccggcaatctcatgtaaaaattgataatcaccgagcgctgggtggctcgtaaaatcgagttttcccgtcactttgatgctgcgcgctttcgtttttgtgttatggaactgaatcccctcagccgggatgaacggttccacaccgtcaagcccttccaggaagtcataatgccaccaggaacgccggaattccccgtctgttaccacatcgagaccgatttctttttgtttttccacgatgcgggtgatctcttgattttcgatatcacgaagctgttccgctgtcatctcaccagccgcttttttttgccgggcttcctttaccggaacggaacgaagcaagctgccgacatgatcggcgcggaaaggtgctttgcgttgtttttctgttttttgtcctgcaacattcgtttgttgagccatgttattcgcctcttttctgaaatattaagcatgtaaaaagctcttcctttgtgtaaggaagagcttgaacgatcaaatctccgcctcatctgcaagaacgcaatgttcttaaggatttagcaccattctgtttgaaacagcggttgccgggtatcatagggccagtccctccacctctcttgataaggtacaacttcatattcagatttcaattatcttaatattattacttttggatcaattgtcaatgctttttagaaaatactttcatcttcatcgttatataaaaccatatcaagcacgatagcgatggcagtgcaaatcagaacatcttcctcgtatgcaatctgcaagtgataggaatcaccccaactgagccactttttgctcactgacatccggacattttccccgtccgtcagttggaattcatccctccataaatcaccatctatttcccagttaagcccggaaatcacaaatttcggtttggaaaacgttactttcttcgttacctcacaaactgttttcccgccaattgaaatctcatagcgcggcaataaagacattagtttttgttctatggaaacgagcgttttcccagatgagtctgtcatttgtaatgagtctcctaacgagaaaaaacgcccctccaccttgaatgtttcttgttcatcccggtcataaatgtgaaatgcatctttaaatgagaacattttttgtttcataaataactcgatcattgctgaagtctcctttgggtttgccttgtatgaaattacggataggtggcgaaaaggtttcaggctctaaatcaaaacaattttaaaaggctgcgtgattcagcagccttttcgtttgaaatatagaattaggaaagatgcatccggcgtttttggcggatggcgtcaaggtcgattaggttgttgtgatgaggtgcggctgctggcagagggcttgtcttttgcggtttgcggcgattgtccttgctgaaagaaaaaagaagatagccgcataatgcgatgataataaataggatcatattacatacctcccaaaaaaagttttggtactctctattgtacggataaaatgccaaaaagtattcaaaaaattctaaatcaataaataacaagaaactgtccctctaaaacagtattacctgatgacctgaaaatagtcttgaattacgctgtttgctcttgttgatgattggttctatagttactatcgacgataaaataaattcctttatataacttttaacctaagtttacgtaattcgaattacctgtttttgggtgctgttttcttgcttgtttggtttataccctattttgcggaattgaacacaaaaaacccaaattacggagcatttgggcggtacgggtgaatacggattgtatttaggggatttgatgttttatttgaagaagcgtttgaacatttttctgattttttgaaatgggctggatttctttttcatgttaagcggcctggaaatgatccattttttcaagagactcttggcagcgattgcatgttttgtcattgtttttcctcctcatttgttgatacttgttttacggaggacgtgtttaaaatgtttcattttcacacaaaaaagccagtccttttttggactggcttttggcgttatgcttgcgcttcaaactgctttgcaatctcaacgatgacatttacggctttgaccatgttgtcaactgagatgtattcaaatttgccgtggaagttttccccgcctgtaaagatgtttggcgtcggaagccccatgtaggacagctgtgatccgtcggttccgccgcggatgggggaaatcttcggttcgatgccgaggttttccatcgcttgcttggcaatgttgacgatttcgatgacaggttcaattttctctctcatgttgtagtattggtcgttcatatccagcagaatccggtcttgcccgtattcgttttgaagttcttcaacggcacgcttcattgtttcttttctgttttggaaattctctttgtcaaagtctctgataatgtagtggagctttgtttcctctacgtctccttgaatcgacagcaggtggtagaagccttcataaccttccgtatattcaggcgcttcgtctgccggcagcaggctgttcagcttcatcgcgattttcgcagagttgatcatttttcctttagctgttccgggatgtacgttgttgcctttaatcgtaatttttgcggcagcggcattgaagctttcatattcaagctcgccgagcggcccgccgtcaaccgtgtaggcaaaggatgcattgaaccgtttcacatcaaatttgtgcggccctcttccgatttcttcatcaggcgtaaaggcgactctgattgtgccgtgcttgatttcagggtgtttgatgaggtaatccatggctgtcatgatttcagcgataccggccttattgtctgcgccgagaagggtggtgccgtctgtggtgatgagtgtatggcccttatagccggacagctcagggaattgatcaggtgacagggtgacctgcagctgttcgttaagaacgatgtcttttccatcatagctttcgatgatttgcggattcacatttttgccggtaaagtctgtagcggtgtcgacgtgagcgagaaagccgattgtcggcacgtctttttcagtattggagggaagagttgccatgacatagccgttttcatcaatggctgcatcctgcatgccgatggacttcaattcatcaactagcatgtttcctaatgtcaattggccgggtgtggaaggacaagtgtcaacggattcatcggactgtgtatcgacttttacatatgtagtaaaccgttcaatgatttcttctttcatttccaatcatctcctttgtcttattttagcatggcgggatgagagatttctattgcacaataccgtttcgaatggcaaaaacgactgcctgtgtccggtcttgggcattgcatttttgcaggatgcggtgcacgtgggttttcacagtgctttcactgacgaaaagcttttcagcaatatcctcatttctcagtccgtaggccatttgctgaagaacctcaagctctcttttggtgaacggctctgccagttcttcggcatgagtttgctgtttcgcccgaaatgtctcactgatgattttagcagctgtgactgtacggaaaatcgcctcgcctctggccgcagcgcgaatcgcatctatcaactcctcaggaagtgtatccttcagcagatagccgactgcgcccgcacggatgccttcaaatacgtattcttccgtgtcaaaggtggttaaaatgactatctttgtatttggaagtgcggacataatgtctttcgccgcttcgatgcctgagcaacgcggcatctggacatccatgaggatgacatcgggttttgtttgttttgcgagtgctataatatcgtgaccgtcgccggcctcgccagaaaccgtcatatccgtctgtgcgttgatgacgtagcggaagccttcacgcacaagcggctgatcatcggcaagcgctacgcgtattttatctttgttcatctttttgctccttattcgttgtcatgagcggcaatgacagctcaattttcaggccgctcggctgtacggcactgaaagtaagggaaccgcctgctttttctgcgcgctctttcattcctgtcaggccaaatccataagtaaggctgccggtgaattgtccgtcgtcggtgattgtgacatagagatgggacttgtcattagaaatgacggccgccgcatgagaagcgtcagcgtgacgaatgatattggtcagcgcttcctgcaagatgcggtagatcgtttcgctcacgtttggaggccaagactcttctgacagtccggcagtatctaaagaaacgtgcaagccgctccgttcctccacttgatgaatgagcccccgcaaagcggtaagccccaccatcgattcactacggcccatttggtgaacaacagaccgcacttcttgaagacactccctggcgacactcagtacattttgaatgactttttctgaatcctccttgctgcttttaaggatatagggaagggattgaagctgaacaatcacagaagtcagctcgtgaccgatgctgtcatgaatgtcgcgggcaattcttgtacgttcctcaaggaccgcgtaccttaatgaaagaacagaagcctcctgcagctctgcatgcgctttctggagttctttatgagcatgctccagctgcacatgcatttttgccaattcagcatgattccgttcagcctcccttctcgcttctcgtctgaaacgcatggaggagaagaggacgtacagaccgagcatgatcgagatgttgctgatgatggtattcaagcttcccccttgtgaggataggagtaatatgttgcctccaattaaacatgctgtgaagatcaaggatagccgtgaagggagtctaaaggcggcatatatcattaaaaatacaatcaaaaaataggcggcaccctgctcttggccggaaacagcccaaaagaaatcggtcaggagccagagtccgatgaatatgctcaaactaacagcagtggatgccacatagggaatgatccaaatgaatgctaagtataccgcaaatacaaatgctaacaaaatgggatcagccttagttggatgagataaaaattgtatgcaattcaaaatgagaataaggctcggcacaagcttcttgtagtagtgccgagccggagtttgtccgttcatgctggtccttctttcggttattgaatggatactttgccagcggtcagtcgtctgtatgctttgtaaagcatgatgttgcgggctgtgatggtgccgaggggaacgaagaacatagaatgaataatggcaataaacatctcgttgctctcaggcagccatgttctcgcggccatgcgcaaagaaagtatcactagaatgaggataacactcccaagtgagccgcgtgaagtgacctttccggtttccgggtgaatccgtacatttaccatcttcccaatgccaaacccgcaggccagcccgatcagtaataaaatgccgctgatcgccacatgtaatacggaatgaaaatacgccggctgaaacgatgcagatacgccccataagagcaacagtggaatgatcagcaacttcccgggctttaccgttctttctcgatacatcgataaaataataagaatcaatacaataaaaatataagggctcatcgccatgtcatcaaatcctttctgcattaagcatagcgaaaataggaaagaaaaacgtcaaccggcagattgatttttcagctctatacttgttcgcgctgcataaagtcatgtaacatggcgtgaaaatgctgaatgtcttcgctgtttcttttccacatcataaacgtttgggacgcaggcaattctagatgtgcaggcgtgctgacagccatcagctttttttcggcttcttcctgtttgataatgtaggtagggaggaaagatgcccccattcccgctttcatcatgtggacagccgtatccgtctgcccgacagccatcatttgaagatacgggtaatgtgatcggatgttatctaaaaaggcatccccatatgacggatgatcatgcgttagcagccgatagcgggttaagacggatgcagcatccggtctgctttcttggaaaggagccgccagacaaagcgtaccttcgcatatatgctgataataaagagtgttggtgttcgggtctttccgcgacaaaccaatatcagcttcattgtgttccaccgcttgtttaatagcgtcagatccagccacatgagttgaaagctcgacatgcggatgtttttggatataggctggcagaaagcgaggcaagatataggacgcaatgtaggggtgtacggccagcgtgagtgatcggctgtacccctgtttccattgactgactttctgctttccagcttggtaaacatggatcatttctttggcataaggcaaaaagagcctgccttcgtcagtcagtacgactcgtcttccgctatgcaaaaacaacctcatgtccagttcatcttccaatttcctcatatgctgagaaacggcaggctgtgtgagatacagatgctcagccgcctccctgaagctctctgattccgctgcggcaataaaggtttgcagccattttaaatccatgaaatatctccttcactgcaagttatccataacaaattgttacgtttacatgcgtatttgtttatcactgattatacatcgattcgtttagtatacctatagaacgagaaaatagagagagggattcatatgaacatatacgtagaagcaaatccatatttacatgacaagtattcaaaatacgcggatgaaaaatataagagagaaggaaacccatttgtatcctttccaattcattttgatgacatcccgtccggagcaaagacgctcgcacttactttcatcgatcatgacgccattcccgtatgcggattcagctggattcactggacagcggctaatattccggcttacatcggagagcttcctgaacatgcgagtgaggaaagacaggacttgatgatacaagggcaaaacagctttgcttcaccgcttgcgggaagcaacgatccaaaggtgattcaccagtattgcgggccgacaccgcctgacaaggatcatgcgtatacattgacggtctatgctttagatgctgagctgaatcttcagccgggcttttacttgaatgagctctatcaagaaatgaaagagcacattcttgctgaaacctctatcgaattgctggcaagggtttaagctaaaaaatatgaaaaaactattaataaacgattaaacttcttaaaaatggatgtggaccggttctaaacactatataatgaaaacaggtcattttttaggagggtttacatcatggcaatacttgttactggcggtgccggttacattggcagccacacatgtgttgaactattgaacagcggctacgagattgttgttcttgataatctgtccaacagttcagctgaagcgctgaaccgtgtcaaggagattacaggaaaagatttaacgttctacgaagcggatttattggaccgggaagcggtagattccgtttttgctgaaaatgaaatcgaagctgtgattcattttgcagggttaaaagcagtcggcgaatctgtggcgattcccctcaaatattatcataacaatttgacaggaacgtttattttatgcgaggccatggagaaatacggcgtcaagaaaatcgtattcagttcatctgcgacagtatacggcgttccggaaacatcgccgattacggaagactttccattaggcgcgacaaatccttatgggcagacgaagctcatgcttgaacaaatattgcgtgatttgcatacagccgacaatgagtggagcgttgcgctgcttcgttactttaacccgttcggcgcgcatccaagcggacggatcggtgaagacccgaacggaatcccaaataaccttatgccgtatgtggcacaggtagcagtcgggaagctcgagcaattaagcgtattcggaaatgactatccgacaaaagacgggacaggcgtacgcgattatattcacgtcgttgatctcgcagaaggccacgtcaaggcgctggaaaaagtattgaactctacaggagccgatgcatacaaccttggaacaggcacaggctacagcgtgctggaaatggtcaaagcctttgaaaaagtgtcagggaaagaggttccataccgttttgcggaccgccgtccgggagacatcgccacatgctttgcagatcctgcgaaagccaagcgagaactaggctgggaagcgaaacgcggccttgaggaaatgtgtgctgattcctggagatggcagtcttctaatgtgaatgggtataagagtgcggaataagaatggaggccttctcaattgagaaggccttttttaaagaacaagggtgcctaaacaggcacccttgttagctgttatttgattttcacaataacatcattactgaattttagtttccaagtgccttttgcataagcttccttgtcaacttcaaatgcttttacacctgttactttaatattaggatttagatcactcaaaattttagagttatcaacttttgtctcagttgcatagtttacagaagcatcaatatcagaatcataagaagtaccatcagcatcaactaatttaacagttggaattgaaaaagagctaatcggctttttagatacgtttttaattgtatattgaacagctacaattgtacctccctcagatgctttcttttcaacatattgagtaccgacagtatctctgtcctctaccttcgtaaccgtcacttcagttttttcagtttttacggtatcaccgatattgtatgttttttcagtttctgctttgctgctgcttgatgttttggaagtggcttctgagccgcctccgccgccaatcatattaccgataataatgatgacaacaactgcgagaataaacgtaatgattttatgtcgcataaaaaagttacgttgatccttaccgcagttaggacatttttttacaccctttgcaatttcttgaccgcaagctttacagggtactagttttcctgccattatatttcctcctatgtaataaaatgtacgaaacatatgtactataatgcctatattatttctcttagtcaatataaaattatgaatttcttataattattatcatttatagttacattcgcttgtaaaatatatgctttttttcttatcggttatatctgttcttttttaatagataaatcgtatttttttccagcttatctgatgaaaactccgcaaataccccttgaaccaattcgaaccgtcccttataatgctaatattggaaagtgaaaaggatatgataaaaacagtggttttctagggttccgcaatgcaaattggactgtgaccgagagaaaacacatagcagcttggctgttatgacacggtgggataaaagcccaggagtttctgctctttttcgagagcgttctcctgggtttttttatttgctagaacagaacaatgaaaaggagtgttttcgtgatgaaaaagagaatgctggatgtacttatgcttgtgattggcgcttttttcttcgcgcttgcggttaatttatttgcgattcccaatgatcttggggaaggcggagtcactgggattacgctgattttgtattatctgtttcaatggtctcctggtgtcacgaactttatcttaaatgcgtttttgcttttaatcggctacaagtttcttgatggaaaaacaacggtttatacgatcattgcggttgcggcaaattcgctttttcttcatctgacacatgggtggagcattccgtctgatgaattgatcattaatacgattttcgcaggtgtatttgccggagtcgggatcggcatgattatccgggtcggcgggacgacggccggttccgcgattctggccagaattgctaataaatatttagactggaatatcagctatgcactcttgttttttgatttaatcgtagtatttagctcttattttattattggtgcagaaaaaatgatgtttacgatcgtgatgctgtatatcggtaccaaagtgatggacttcattattgaaggtttgaatacgaaaaaagccattacggtcatttcagaaaataagagtgagattgcagagcaggtaaataccttgatggatcggggcgtgacgattttatcagggaagggaaattatacgggccagtcaaaagagattttgtatatcgtcattaacaaacaggagctgtctatgctgaaaaaaatcattagaagctgcgacaaaaaagcgtttgtgatcgtacatgacgtacgcgatgtgtttggcgaagggtttgtggatatatctaaataaagaaaaatccctctgtacttgaaacagagggattttttcatttagaacggatatttgcggtattgcttctgtatcgaaatccatttcgtcacggtaaattcctcgacgacccacggattgccgaaacggccgacaccgcttgctttgtttccgccaaaggcaatattcggcgaatcattgacggactggtcgttgacatgggtcatgccgctgtcaatttgcagggcgaacttttcgcctttttctaaatcagaagtgaaaaccgcagagctgaggccgtattcagtatcatttgccatgtcaatcgcttcctggtcgctgccagctttaataatggttgcgattggggcaaacagctccgtttgggcaattttgctgttgttgtccgcaccgacaaagacgtacggcgtcagcacgtttccgacgcgttttccttcaaccgcaagctcaatgccgtctgtctttgcctgctcaatgatctccagcgctttctcgatttggcgctcgttgatcagcgggccgacaacggttttcggatcggtttgatcgccgtacggaagctgtttgacacgggcggtgaatttttctacaaactcatcgtatacatcttgatgaacgatgatcctgttgataatcatacagatttgtccctggtgaataaattttccgaaaatcgcggcatccacagcacgatcgacatccgcatctgaaagaacggcaaatggattgttgccgccgagctcaagtgccattcgtttgaaggcgcgaccggcgatttcaccgatgtggcgcccgactgctgttgaccctgtaaagctgattaatctcgggattggattggtgagcatgccgtccccgatttcctttacatccgtcagcatgacgttaaggacaccggcaggaagaccggcgtgttcaaacgctttcgcaatgatggtcccgccggaaatagcagtttggatatcaggcttgtgaacaacgctgttacccagcgcaattgcgggcgcaatggatctcatggatagattcattgggaaattaaatggagaaatcgatgaaatgacacctagcggaaggcggtaaatcttattggttttcccttcaatgtcggatggcacctctttgacgccgcctaattcaccagtatacgtcatggcttcatctaaaatcgcaatcgtttgttccagctcgattgttgatttaatgatcgttccgccagtttcgcgggcgatcatcataatgatgtcatcacggttttcgtgtaaatagccgcgcgctttttgcagcacggcttttcggtcttccgtcgtgctcttggcccactctttttgggctttctgtgcaatgtcaaacgcatcctcaagctgtttgcccgttgccaaagatgctgttgtgatcacagactggtcatacggattcaaaatgtcctccgtacgtccgctttctcccccagtccattttccgttgataaaacttttgtttaacgtttcgaaactcataagatgaccctcctttggtcctgcatgtcttcttctatttccgctgaagccaatatgtaaacgaatgaggtttccctttcagtttctcgtctatctataccggatatactcttttttagtggagaacatgtgtgtttcgccttatactgaatatacagatccttacataagagaggagactctatgaaatcgctgctggctatttatcccggttcgattgtgtctgaggagctttgcataagggaaggctgtctatgtttttttgatgagagcaatcagagatatatctccattccgaaaacagagatcagtgaaaaagaagtattggtgctgcagtcatttttgacgcctgcggatgagggcaatcaactgtctatgaaatcacctgaggaaaacaagtggttttcgttccttttttccagaggggaattgccggcgtatataaagaaacggacgagatttgttcactttcatttattcggcaaaatagaaaggacgtcctttacggaagcggttcgccatttttggccggtgtcttttgtgattgtgtggatccatgaggacagaggtgtgattgtcgagcaggaaagtgaagcggcggcggagaaggacgaactggaatcgctcgctaaggttcttgaaagtgatttctacttcagtgtccgtttttacgccggaagattttacgagccggatgagtgtctgcgaaaacattacgctcgtgaacaggcgtatttcctgtttgctgaaaaacggctgcctcaggtgcagagtgtgacctttgagatgatctttccttttctattattagaaacagaaaaagaaaaactggaaacactgctctctgaagaagctgagcttttatttggaagtgaatctgagctaaggaagaccattaagctgtttattgaaaacaactcaaacgtcacattaacagcgaaaaagctgcatctgcatcgcaacagcctgcaatatcggattgataaatttattgagcggtcagggatagatatcaaatcgtacaaaggcgcgcttcttgcctattttatctgcctgcaaaatgaaagttcagaataaattggaaatatgcacgaaaaatggctgggtgattttatgaacgctgcccattttagcgagagggaattgctgttacactcaatataagaaagcgtttacaataacaaagggggatgttagatggctgaattgcggatggagcacatttataaattttatgatcagaaggaaccggcggttgatgactttaaccttcatattgccgataaggaatttatcgtattcgtcggcccgtccggctgcgggaaatcaacgacgctgcgaatggtcgcaggacttgaagaaatttcgaaaggtgatttttatattgaaggaaaacgggtcaatgatgtagcgccaaaggacagggatatcgcgatggtatttcagaactacgcgctttatccgcatatgacggtctacgataatatcgcgttcgggctcaagcttcggaaaatgccgaagcctgaaatcaaaaaaagagtcgaagaagccgctaaaattctcgggcttgaggaatatttgcaccgtaaaccgaaagcgctgtcaggcggacagagacagcgggttgcgctgggccgggcaatcgtgcgggatgcaaaggtgttcctgatggatgagcctttgtcaaacctggacgcgaagctgagggtgcaaatgcgggcggaaatcattaagctccaccagagattgcagactacaacgatttatgtgacgcatgaccagacagaagcgctgacaatggcgacacggattgtagtcatgaaagatgggaaaattcagcagatcgggacgccgaaggatgtatatgaattccctgaaaacgtctttgtcggcgggtttatcggatcaccggcgatgaattttttcaaaggaaagctcacggatggcttaatcaaaatcggttctgcggcattaaccgtcccggaaggaaaaatgaaagtgctgcgtgaaaaaggctacatcggcaaagaggtcatcttcggcatccgtcctgaggatatacatgatgaattgattgtcgtggaatcatataagaactcttcgattaaggcgaaaattaatgttgcagagctgctcggttctgaaattatgatttattcgcagatagacaaccaagactttattgcgcggatcgacgcccgcctcgatattcaatcgggcgatgagctgacggttgcatttgatatgaataaaggccatttctttgacagtgagacagaagtgagaatccgataagatcaaaaaaaccggacatggagacatgtccggttttttgctattgaaaatctcagaatcaaaccgatgaaaaaggaggaagaaatagacagaaagcaggagaacgatgaaacgattgtttttaagcatctttcttttgggcagctgtttggctcttgcggcttgtgctgatcaagaggcgaatgcagagcagccgatgccaaaagcggaacaaaagaaaccggaaaaaaaggcagtacaagttcagaaaaaagaagacgatacatccgcatggatcaaaacagagaaaccggcaaagctgccgattttgatgtaccacagcatttcttcaggaaacagcctccgtgtgccaaagaaagaattcgaggcgcatatgaagtggcttcatgataacggctatcagacattaacgccgaaagaggcatctctcatgctgacgcaggataaaaaaccgagtgagaagtgcgtgctgatcacatttgatgacgggtacaccgacaattatcaagatgcgtatccggtgctgaaaaagtacgggatgaaggcaacgatttttatgatcggcaaatcgatcggacataagcaccatctgacagaggaacaaatgaaggaaatggcacagcacggcatatcgattgaaagccatacgattgaccaccttgagctgaacggattaacgcctcaacagcagcaaagtgagatggctgattcgaaaaagctgttcgacaacatgtttcatcagcaaaccaccatcatcagctatccggtagggcgctacaatgaggagacgctgaaggccgctgaaaaaacaggctatcaaatgggcgtgacgacagaaccgggcgcggcttcgagagaccagggaatgtatgccctccatcgtgtgcgcgtgtccccaggcatgtcaggctcggcttttggtgcgtacatcgaatcaatgaaataaaaaaaggcggcgtttaatcgccgccccctccgccgccacagccggaatcgctgaaacctccgtcactgctgcatccatcatggtgtgagctatgatctgaataaccgaaatacccgctgtccgcctgctggcggcttttgtttttcgagggctgcggctgaatgactgaaagaaaaacaataatagatataaacaataagatgatcacaatcacttcgcgtcactcccttttttcaccatatctgttatacggatgaaacgctgaccggtttcatttcaaagtgatcgattctttcagtcggtctctgagccagcgctttagcaccccatgtcctttgtttgacaataaagtgccgacacgccaatacataggaggatgaggagcgaactgaaaatcaatcaatctgaaaaaccagcttttatcacgggtgagagaatcaatttgaagctcgtcttcacctgcttcagagctataggcactttgtttctgtatatcctcatcttgccgaaccgccaagattctcaaggcttcagccatttgtttgtaaccgccgtccagcaatgatgcgccaaggttgtcagcacgcacctccatccattgtgaacaaaaggattgatagagctggaataggataatgattgccataatgaaagcccaaagcgcaattttgtgggcctcgggatgggtgatatgctgctcaaacaagaggaaaatccccacgacagctccaagatatagaaaacgcaaaagctgtgatgacagaacgtcacgttttttgatatgaatcgcctcatgggccagaatgccttcaatgacacgctgtggaagtgttagtgtggcgcttgtcaggatgaccattgacctcccgacattcatgcctactgccattccgttgtaatcatcactctccgtttcgtatatgcggacatgggaaatgccggccgatctgaaaatcttatcggccgcggcctgtacatgcggatgatgacaagacttggcgtccatcgccgcccgcaacacacggtctgacatatacatgttgaatacccaatataggattacggcaacagccatgacccatggagaggcgtgtaatgcgtataacgcgagcaccaataaggcgtaagcggataccccttttacgctggcggcaaaataaagcttaccgagcagccgcttcacattttttcgatgataaaacggcaaaacagaaatcacattgtccacattgttttctgcatctgtgtattcctgaagaattgttttccatttttgcggttccttcaccgtcagaaacagtgtttcgccgggaagagacagtttaatgacttgctgaaagcttgttgtcaaatctaaacgggatgaatacatcgtcagaagcggatggagctttaagagatctgctgttgattcaagctgaatgttcttcaaatcggaaagcgggtatgtacgggtttcatagtgtgagctgatatgcaatttttctaaggctgctgaataaaaaacctttacgctaaaaacattcagtattcgcttcacaagtgcccctccgccggagatcattccgagaaggatcacatatttgagagggcttgtgtcaggtccatagatgaaaaaaatgacagcccctgcaaacacaatggcggtcagcgtaatgtctgacaggaggcgtgttttgtttttggcaagctcgatttcctgccagtctcccgaaggtttttccacacgctctgaaacaatgagatccattgcggtccaatagcagtagaacattgtcgcgagtgagacaatgccgtccatgaatgagagatgagagaagatgtaagccgcagcgccgacccatagaacaatatcaatccagaagtctatggccggaatgagttttgcagctagggctgatatcaaataaaatcccagcccgagaagcataaagagaaatagatgagttcccataggcatgccagattcctttctatctagtatttccaactattactatagcatgggatgggaacttgcaaaaacatggacatgcaaaaaagcaagctctttcgtttgacgaagaacttgcttgcggggatcaataaaactggtgcagcagcaataaggttaaggatactgtaatcgcgcccccgatgcgggtagacacctgggcgaaaggcattagctcaagcctttcagcggcgcttaaaatggcaacgtcacccgtgccgccttgcccagaatggcatgcattaataatggcggtttcaatcggatacatgttcagccattttccagtgaagaagccaacggccatcatggtcacaacgacagacagaatcgtgataatattgctgaggttaaaagcggcgacaagcttgtcccacggcgtcatggataccccaatcgcaaagagaagcgggtaggtcacagctgttgaaaagaagcgggacactccaaacgcgccattttcaattgaggcaggcaccaatctgaacagcttgattagaacagccagtaacagcatggcaacgggtgccggaaaaccgaaaaaatcgtgagcgagcatgccgactaagtataaagaaacagcaaggataccgcctgacgcaaataaagaaaggttgaacatttgctgtccgctttgagattcctccagcgcaggggactcttcttcggagcggtccactttgccgttgcctgtccattccggttttttctttccgattcggttcagcaatcccgctagaataatcgcgcacaagctgcccagcataatcgatggcagaacaagtgcaaacgcttccccttgagaaatgggcatgatgtcagaatatccgatggacagcgggatagcgccttctccgactcctccagccatgatcggaatgacaatgtacagcagggtatgctgaaatccgagtccgagcaatgtcccgacagccagtccgacaatagcggctgtgacagaaccgacaataagcggaataaagattttcatgaatgcttttacgagtgtttctcttttcatgccgagaatgcttccgacgacaataccggcgataaacaaatatagaaagtttgagttttctgtaaattctgtggtggatttgacgatatcattaggcagcaggtgatagtacacgacagcggacggaataaaagtagctaggatggccgggccgccgatagaacgaacaatcggtatcgatttgccgatttgggcaaaggtaaacccgaaaaacgccatgacggcaatggatgtcaaaatgtcactttttacatcgtgatgcataacaaaaacagtgattaatataaacagcaaggcatacacaggaagcggtatgatgcctacttttatattcatggctttcgcaaaccaattctcttttcgaaccccttcgtgaattgtatccgtttgcaattgcatgtgtgtttgaagctctcccattgaaaaacctcccctattcttgatgcagtgaaattgttcactatgttaagtatactaaaaaattgaaattattaatatattaaaaatttactattcaacttttctcctcttaccggttcaaatgaaaagaggcattctgactaaaatcggtttaagacggaatgctgagactcgagtgctggggcgggggcaagcattttgttcgcaaggaacgatgtgttgatgtacgataataaagggtcatttatcctagcagccgacataaataagcaacaaaatagacaaaaatccgtcacatagtgcgggactttttaggtattttaggctttatttttgaaatgaatcgttgtaaagtacttaatatgaaccagtcagagattgtgtcatttggtcagtctggcaatcttgcatcatattggatgactttttgacacatttgtgaaatattgagcaatatttttttcgtctattttgtgaattactgatcaaagtctcggttctatttgtgaagtagtgagcaaattaacagttttaaccggaaatggaggagaaagcatgagtgaattggtattagcccgcatacaatttgcatcaacaacgttgtttcacttcttgtttgtgccgatgtctatcgggcttgtgtttatggttgcgttgatggagactctttatcttgtaaagaaaaatgagctgtatctcaaaatggcaaagttttggggacacttattcttaataaatttcgcagtcggtgttgtaacggggattttgcaagaattccagtttggactgaactggtcagattactcccgttttgtcggagatgtatttggcgctccgcttgcgattgaagcattattggcgtttttcatggaatctatttttatcggattatggatttttggctgggaccgcctgccgaagaaaattcacgcgctctgcatatggctcgtatcattcggaacgatcatgtcatctttctggattttaacagcaaactcctttatgcaggagccggtcggctttacgatcaaaaacggccgcgcggaaatgaatgattttggcgcgttgattacaaaccctcagctttgggttgaattcccgcacgttattttcggtgcgcttgccactggagctttctttattgccggagtgagtgcttttaaactgctgaagaaaaaagaagtgccgttctttaagcaatcttttaaactcgcaatgatcgtcggtctttgtgccggtcttggcgtcggccttagcggacacatgcaggctgagcacttgatggaatcacagccgatgaaaatggctgccagtgaaggcctatgggaagacagcggtgaccctgctgcttggaccgcttttgcgacgatcgatacaaaaaatgaaaaaagctcaaatgaaatcaaagttccttatgccttgagctacttggcttatcagaaattcagcggaagtgtcaaagggatgaaaacccttcaggctgagtacgaaaaaatatacggaaaaggcgactacattccgccagtgaaaacgacattctggagcttccgcatcatggtaggagcaggtgttgtcatgattcttgctgcgttaggcggcctttggttaaaccgccgtaaaaagcttgaaaacagcaaatggtatttgcgcatcatgatcgcgttgatttccttcccgtttcttgcaaactccgcgggctggattatgacagaaatcggacgtcagccttggacggttatggggttaatgacaaccgctcaatctgtgtcgcctaacgtaacagcgggttccttgttattctcaatcatcgcattcggtgtgatgtacatgattcttggtgcactgcttgtcttcttgtttatccgtgagattaaaaaaggtgcggagcatgataatcatcatgatgtgcctgtatcaacagatccatttagtcaggaggtataccatggcatctcttcatgatctttggtttatactcgttgctgtattgtttgtaggattcttctttttggaaggctttgatttcggggtcggcatggcgacccgttttcttggccataatgaattagaacgcagagtgctgatcaacacgatcgggccgttctgggacgcgaatgaagtgtggcttttgactggcgcaggcgccattttcgcggcattcccaaactggtatgcaacgatgctgagcggttattacattccgtttgtcatagtgctgcttgcgttaatgggccgcggggtcgcgtttgagttccgcggcaaggtggatcatttaaaatgggtaaaggtttgggactgggtcgtttttttcggcagtctaattcctccgtttgtgcttggtgtgctgttcacgacattattccgcgggatgccgattgatgccgacatgaacattcacgcacatgtatctgattatatcaatgtatattctatacttggcggtgtgacggtaacgcttctttgcttccagcatggattaatgtttatcacgctgcgtacgattggtgatttgcaaaaccgcgcccggaaaatggcgcaaaagataatgggtgttgtttttgtagcggttcttgccttcgcggccctttctgcgtatcagacagacatgtttacacgccgcggcgagattaccattccgctcgctgttttgattgtcatctgctttatgctcgcggctgtatttattcgtaagaaaaaagacggctggacatttgggatgacaggcgctggtctggcgctgaccgtgggaatgatctttatttccctattccctcgtgtaatggtcagctcgcttcatagcgcatacgatttaacagtagctaacgcttcttctggagattattcgcttaaagtcatgtcaattgcagcattaacgctattgccgttcgtcatcggcagccagatctggagctattatgtcttccggaagcgcgtcagccataaggagcctatgacttattaatgggaaaagacctgtttcgatataaaggaatgaagcggattctcaccttgattacttgtttaacgttgattcagacagccgccattattatgcaggcagagtggctgagtgaggccgtaaccggactgttcaacgggaagggcattacctcccttttaccggtgatcggctttttcctcatcgcttttatcgcccggcacgggatgacggtggcgcgacagaaaatcgtctatcaatacgccgcccggacaggagcagatttgaggaaaagttttcttgatcagctgttccgattaggcccccgctttgcaaagaaagaggggacggggcaaatggtgacgctggcgatggaaggcatcagccagttccgccgctacctggagctgtttctgccgaaaatggtcagcatggcgattgtgcctgcggcagttgtcatttatgtgttttttcaggatcggacatcagccatcattttagtcgctgctatgccgattctgatcatctttatgattctcctcggccttgtcgcgcagagaaaagcggatcgtcagtggaaatcctatcagagactttccaatcattttgttgattctcttcgcgggctggagacattgcgtttcctaggtttgagcaagtcacacagcaaaaatattttctatgtgagtgagcggtatcgcaaggcaacgatgagcacactccgggtggcgtttttgtcatcattcgccctcgattttttcacgatgctgtcggtggcgacagtcgcagtatttctgggcctgcgcctcattgacggcgatattttgcttggccctgctttaacggcgcttattctggcgcctgagtattttttgccggtgcgggaagtggggaatgattatcatgcaacgctgaacggccaggaagcaggaaaaaccattcaagagattttgtcgcagcctggttttaaagaagagacgccgcttcagctcgaagcttggtccgatcaggatgagctgaagctgtcaggcgtgtcagtcggccgttcggtgtctgatattcatctctcattcaaaggcaagaaaaaaatcggcattatcggtgcaagcggcgccggaaaatcaacattaattgatattctcggcggatttttagagccggatggcgggatgattgaggttaatggtacaagccggtcccatttgcaggacggcagctggcagaagaaccttctttacattccccagcatccgtacatttttgatgatacgcttggcaacaacattcgcttctaccatccaagcgcttcggcagaggatacaacacgtgctgctgcctcagcgggactgacggagctggtgaacaaccttcctgacggattagaggggcggatcggggaaggcggccgggcgctcagcggcggccaggcacagcgtgtcgcgctggcccgcgcctttttgggaaaccgtccgatcctgctgctggatgagccgaccgcccatcttgatatcgaaacagaatatgaaataaaagaaacgatgctggatttatttgaggataagctcgtctttctcgcgactcaccgccttcactggatgctcgatatggacgaaattatcgtgcttgacgggggcagggttgcggaaattgggactcacaatgaactgctggagaaaaacggtgtgtataccaaactcgtgaaggcacaactgggggaaagagcatgaagaaagaagaatggattttgccgtatatcaagcaaaatgcccgcctgttcgttctggttatctttttgggtgcggtgacgattttttctgctgcttttctcatgttcacctcaggttttttgatttctaaagcggcgacaaggccggaaaacattctgctcatttatgtgccgattgtcgctgtgcgcacctttgggattgcgcgctctgtgtcgcgatatgtggaacggctcgtcggccatcacatcattttgaaaatcgtatctgacatgcgcgtccgcctttacaatatgcttgagccgggtgctttgatgctgcgttcccgttttcgcacgggggatatgctcggcattttgtctgaggatattgagcatttgcaggatgctttcttaaaaacgatttttcctgcgatctcagccttgctcctgtatgctgtgtcagtgatagcgctcggcttcttctcttggccgtttgccatattgcttgcgctgtatttgtttgttcttgttgtattgtttccggttgtgtctttgctcgtgacgagagcgaagaatgcgaagctgaaaagcggacggaatgtgctgtacagccgtctgacagatgctgtgatgggtgtcagcgactggatgttcagcggacgccggcatgcttttattgatgcttatgaaaaagaggaacgtgattggtttgagcttgaacggaaaaaacaacgctttacaagatggcgggactttgctgcgcaatgccttgtcgctggccttattttgctgatgctgttttggacagcgggacagcaagcggacggcgagctcgctaaaacgatgattgccgcttttgtgctagtggtgtttccgttgacggaagcctttttgccgctttcggatgccttaggcgaagtgccgggctatcaggattctatcagacgcatgaacaatgtggctcctcagccggaggcgtcacaaactgaatcaggggatcaaattctcgatcttcaagatgtcaccttggcctttcgtgatgtgacgttttcttatgacaacagcagccaagtgctgcacaacttttcctttacgctgcgccaaggagaaaaaatggcgctgctcggccgaagcggctctgggaaatcaacatcgcttgcattaatcgaaggcgccttgaaaccggactccggttctgtgacgttaaacggagtggagacagcgctgttaaaggatcagattgcggatgcggtggccgtgttaaatcaaaaaccgcacctgtttgatacaagcattttgaacaacatcaggctcggaaacggagaagcaagcgacgaggatgtgcgccgcgccgcaaagcaggtcaagctgcatgactacattgagtcattgcctgacggatatcatacctctgtacaagaaaccggcatccgtttttccggtggagagcgccagcggatcgcacttgcgaggattttgctgcaggatacaccgatcatcatcctcgatgagccaacagtcggcctcgatcctattaccgaacgtgaattgatggaaacggtgtttgaggtgctgaaaggaaaaacgattttatggattacacaccatctcgcgggagtggaagcagccgataaaatcgtatttctcgaaaacggcaaaacagaaatggaaggaacccatgaggagctgctggcggcaaacgaacgatatcgccgcctgtatcaccttgatgttcctgtaaaataaaagacagccctaaaaggctgtcttttttgtttgaaaaagaaaagggacaggaaaaataggaaaagaaagcagaggagggatagagatgaatgttccattttggacggaagagcatgtaagggccacgcttcctgaaagagatgcggagagccataaaggcacgtacggtacggctttgctgctggctggaagtgacgacatgccgggagcagcgctgcttgcagggcttggggccatgcggagcggtctcggcaagcttgtcatcggtacatcagaaaacgtaatcccgctaattgttcctgttttgcccgaggcgacctattggcgtgacggctggaaaaaggcggcggatgctcagcttgaagagacgtaccgggccattgccatcggaccgggccttccgcaaacggaaagcgtacagcaggcagtcgatcatgtgcttacggctgattgtcctgttattttggatgccggagcgctggcgaagcgcacatatccgaaacgggagggccccgtcatcctcacgccgcacccgggcgagtttttccgaatgacaggggtgcccgtgaacgaattgcagaaaaaaagagcggaatatgcaaaggaatgggcggctcagctgcagactgtcattgtgttaaaaggaaaccaaaccgtcatcgcgtttcctgatggagactgctggctcaatccaaccggaaacggggcgctcgccaagggcggaaccggtgacacgctgacgggcatgatattggggatgctctgctgccatgaagatccaaagcacgccgtattaaacgcggtctatttgcatggtgcgtgcgccgagctctggacggacgagcactccgctcatacgttgctcgctcatgagctatctgacatcctgccccgcgtgtggaaacgatttgaatgataaaaaagctgtcttcagagagaagacagcttttcttgataccccgcccgttttttcagacgcggtttcattaatacatagtaaagcacagaaggcacggccaagccgataatccatgcgatgtctccgccgccaaacattttggcaagcggtccgatgtaaaagcttgtgttgataaacggaatttccagcaagatagacagaacgaacgcaattgtggtgatccaattgacctttccataaggcccgtttacgtcgaacatggctttgacttgatactttccgtggcggacgaagtagtaatcgactaaattgattgccgtccacggaattaagaaataactgatgaaaaagataaaattcaaaaacagttccataaaattgctctgtcccagtaggcttaagactgtgccgacaagcgtgacacccaggatcatgatgattctgactttgggcgtgacttttaatttcagaaacggctccagcgttgttgtcgtggacatgaaagccccatacaggttaaaaacattgattgccatttgcccaaatagcacaatgatcagcataataaacgagaagggaccgaacaattggacaatctggctgcctgagtttgccgtaaagtcaggaagtgaggttgtcagcaatgcgccgagcagcatcatccagatggagctgacagatgtacctgcatagctgtaccaaaatgtttttgaagccggtgttttaactggcagatatcttgaataatcggcaacatacggcgcgtaggcaagctgccacgtcgcaactgcgctgactgccactaggaaaattggcagatcaatcgctccgggtatccagctgcctgccggaatcggcaattgaaaaatgagaatcgttgcagcaaaaaatacagcaaaagaggtccaagaaaggattttttgcattttgtgaatcaaatcatggccgaaaatggtgagtaaaaaacatacggcacttaagcctataatgctccatgatcccgggatgggaacaaagctgcttaaggttccggccgccagaatcgtgctgcttgcgaagaaaccaaggtagataaacatgactaagaagaggggaagaatcgctccgattacgccgaattgggcacggctttgaatcatttgcgggatgcctagctgagggccttgcgcggaatgagaagccataaatatggcaccgattaaggttccgcaaataatagcggcaacactccaaaacagattaagtcccattgcaacgggaatcgtgccggtcactaacgtggtgatatgcatattagccccgaaccatacgggaaataaatctttcgctttaccatgtctttcttcattcggaatatattcaatcgttcgcctttctactttcaatgcatcgtcctccatattggatgtttttttgaaatcgacataaagtcatagcttaacagactataagggggtttacaaataaggatatgcagccaaacggccgggaagcctgatctgtcaatggctgaaaagaattgtaaaaaagatgaacgcttttgaatccggtgtcgtctcataaggcagaaaaacaaaaaaggggggatcacggtcattggatacacaagaagaacagcggctgatccagcaggcgaaagagggaaacgacgaggcgtttacagcccttttccactatcactattctttcttatataaatacttgttaaagctttcccttcaccccgatctcagcgaggaacttgttcaggaaacctttctgaaagggtacatccatttaagaagctttcagggccgttcaaaattctccacatggctgatctccattgcatcgcggctctatctcgatcaccagaaaaagagaaagagagaatggaaacggaatcagacagttacggaggaaacaatccgcaagatcaagtgggacgtgtcggcgaaaggggcagagtggagcgaaacgctcgatctgttttcaaagctggaccctaaactgcgcacaccggttttattaaggcattactacggctatacctacgctgaaatcggggtgatgcttcaaatcaaagaaggcactgtaaagtccagagttcataaagggctccagcaaatcagaaaggagtgggatgatgaataaagaaaagctttctgatcatttaaagtcagaatggaaaaaaattgatcaaacagccaatccctctataccgaatcaaaaagaactgcttcaccagctgtcacaaatgaaagctgaatacagaaaaaaacttcttcaagagatcattttatttgtattctgcgcgctgatggttgtgagtgctgcaatcttagctttcactcaagctcctgctgtgtttattgtgcttcaggtttgtgtgcttgcggtgctgccgattttgattgcggctgagaaaaaaaggcatctcggcgaatgcgaggtgaaacgcggatgacacaaacagaaattatcataacggttgcggcttgtctcatcgtattggcgcagggaatctttttatttattgatgcgaaaaaacgtaatcacatggcatgggtttgggggattgtcggattgattcaagcaccgatgcctctgatttgttattacttttttgtcattaggccggatcggaagaaaagggggatcaagcaatgaatatttcttgggaaatgattttgccgctgattgtattacagctggctttggcggtgtttgcccttatcagctgtataaaagaagagcggacgaacgggccaaagtggatgtgggctgcaatcatcgtatgtatcaatattatcgggccgattttatttttcaccgtcggcagaaagcaaaggtaagccgatatgctgtctattgaatcattatgcaaatcgtacaggcaccatgaagctgtaaagaatgtcagttttcacgtgaatgaaaatgagtgtgtcgcactattaggacctaatggagccggcaaaaccacgactctgcaaatgctggccggactgctttcgccaacctctggaaccataaagctgttaggagagaaaaagctggatcggcgtttgattgggtacctcccgcagtatcctgctttttattcgtggatgaccgcaaatgaatttttgacatttgcggggagactgtccggcctttcgaagagaaaatgccaagagaaaatcggcgagatgctggaatttgtcggtttgcacgaagcggcgcacaaaaggatcgggggctattcaggaggcatgaaacaaagactcggtctggcacaggcactgctccataaaccgaagtttttgatattggatgaaccggtgtctgcgcttgatccgacaggacggttcgaggtgctggacatgatgcgggagctgaaaaagcatatggccgttctgttttctacacatgttttgcacgatgcagaacaggtgtgtgatcaagtggtgattatgaaaaacggtgagatttcatggaaaggcgagttacaggagctgaaacaacagcagcaaacgaacgtttttaccctttcagtgaaagagaagctggaaggttggcttgaagagaagccttacgtctcagctattgtctataagaatccgtcccaagcggttttcgagctgcctgatatacacgctggccggtcattattaagtgactgtatccgaaagggattgaccgtcacccgctttgaacagaaaacggagtctctagaagacgtctatctaaaggtggtgcacgcatgaaggtgatgatggcgctattgcagaaggagtggctggaaggatggaaaagcggcaagctgatttggctgccgattgcgatgatgatcgtcgggctgacacagccgctgaccatttattatatgccggaaatcatcgcacatggagggaaccttcctgacggcatgaaaatcagttttacgatgccctccgggtctgaagtgatggtcagcacgctttctcaattcaacacgcttggcatggctctggtcatctttagcgtgatgggcagtgtagccaatgaaagaaatcaaggggtaacagcgctgattatgtcgcggcctgtgacggcagcccattatatcgtgagtaaatggctcatccaaagcgtgatcggcattatgtcgtttgcagctggatacgggcttgcttactattacgtccggctgctgtttgaggacgcatcattcagccgctttgccgcaagccttggcctttacgctctttgggtgatatttattgtgaccgccggccttgccggaagtacgatattccggtctgtcggagcagctgcggcttgcgggatcgggctcacagcagccgtttcctttgctgtttcactatttccagatggtgcgaagtggcttccggctgagatttgcaagcaggcggagcatatccttcttcatggagagcgggcagattttttcggatggtcactcactttctccattctgtgcatcatgcttctggccgtgttttctgtgtggcgcttccggcggtatgaaagctattaattgatcatgttacgtttttgcgcgagcatcacaaaaaaggcggcaaatgccagagaaccggctccataaaaaactcccgcaagcccgataagctgtgcgatttttccggcaagaaggggcccgaggaagatgcctagcgcataaaatgattggtaaaaccccatcactgacatttttaaacgggcagaactgatttcgacgacatggcttagcagcagaggaaaaacgaagccgagcgccagcccaatacaggcgtgtgtgatgcaaaccgtgaacaatgcagctaaaaaaggaacatatagcaaacagaccccggtgacagcgaaactaatgagcatcacggagtaagcgatacggcttgtaaagcgcagaaacacaaagcttaatgtggcggctgcgtgtgggaggaaaaaggcgctcatcacccaaagcagctccgcgtcgcccattccgagctgattcatgtaaagcggcgtaaaaccaaacactgtgataaataatacggcatgggccgtcatagacaggatggtgaaaagcttcagctttggcagccgcaatgtatctttgatgtactgattgacacgaatggtgccacggtttgcgggaggagcagacggatcctgaataaagcagcagatcaccagacctgcggcagaagctgccagcgccatccaaaaaggaacctgcctccctaaatgggctgcggcgagcccgcagaacacaatgctggcaaactgaggcatgacggtaaaaaactgcatgatgcccattgcttttgatgcattgccattgttgaaataatgtgcgtataaaatggtcgccatcacccacgtagaagcagtgattcccgcgaaaagccgggcggccagcacgaagaagaaagaatcaaacatcagaaaaagcaggctgctgaggacggaaaagccgaacccggcaattaacaattgcttgcgcaaggaaaacaggatgtctgacaaaaggccgagcgggaatcgcagaaggatttgcgtgaccccgtagctgccgagaatgatgccgattgcgccatatgaaaagtgcagatcctccaaatacagactgaatacaggaacgtaaatatagcctgaaaaccagaaacaaaataccatgcataaaaaaacggcgtgatctaaagcgccgattgtttttttctgaggaatcaagtcctgctgtaattccatcgtatctctccacccctttccttccaagtacaacacaattattgaaagcgtttcaatagaaaaataaaaaaacagggcttctaaaaaagccctgttcgctgttgttaatacggatcagacggatgactctcctgttcagcctgctttgcagcctgttccgtttcagttgtgccgatcggcccgttgctgttgttttcggagaccttttttagcccttctgctacgcgttttccgtagtcaggatcagcttttgtgaaattctcaatcatttgatcctgaatttcttttcggcacgtagaaagcgtattcaccaaattcgtaatcaattcgttccgctcaaattcagtaaatctccggtacgtttctccagcctgtccgaagttgtttgttctgtcaatcgcttcacgctttacatcaccttcgacatgcggcgtatggtcttttccgtcttgcttcgcttccttcagcccgcccataatggatggctcgtagttgacgtgcgggttttgtccttctgctctatcgacccgatattgcatttgcccgccttcctggttggtggcgacatgctttttcggcgagttgatcggaagctgcaggtaatttgcgcctacacggtagcgctgcgtatcagagtaggcaaacgtacgcccctggagcaatttgtcgtctgaaaaatcaagcccgtcgacaagcactcccgttccaaatgaagcttgctccacttccgcatggtagttttccggatttttgttcagaaccaatttgccgatcggtttccatgggaaatcgtctttataccacagttttgttggatcaagaggatcaaagtccagttcaggatgctcatcatcgctcatgatttgagcatatacttcccactctggataatcgccattttcaatcgcgtcatatagatcctgtgtggcatggttaaagtttttcccttgaatctcttctgcttccttctgtgtcaggttgcggatgccctgcttcggttcaaaatggtatttcacgagaacggccttgccctcctcattcacccatttataggcatgtacgcctgaaccctgcatttgccggtagttggccggaatgccccaaggcgaaaacaagaaggtgatcatgtgtgtcgcttcaggagattgagaaatgaaatcgaagatacgttcaccatcctggatgtttgtcactggatcaggctgaaatgcgtgtacaagatccggaaatttcagcgggtcgcggataaaaaagattttcaggttgtttccgaccaaatcccagtttccgtcttctgtatatagctttacagcaaaaccgcgcgggtctctcaatgtttcaggcgagtgttttccatgattcacagttgaaaaacggacaaatgccggtgttttcttgcctttttcctgaaagagcttggcccttgtgtatgttgaaatcggttcgtctccgaagcttccgtacgcttcaaaatatccatgtgcacctgctcccctggcatgaacaacccgctctgggatgcgttcccggtcgaagtggctgatcttttcgagaaaatcatagttctcaagtgttgtaggccctctattcccgacggttctcacattctggttgtcagtaacaggatgcccctgcctattcgttaaggtatcctctgactcgtttttcccggatgtcttatgagaaaacgcttcctcgctcccttgggcatttgattggtgctgcttgttttgatgatcatctttcaatggttggccctccttttttgaacggtaacaatattccctgaatggaaagattttaaaacagccgttttttttgatctgcttcgggaatggtacaatgtacaaaaatcggtaaaaggagaggtcgattcgtgacgagagaaaaaaatccgctgcccatcacgttttatcaaaaaaccgctcttgagcttgccccatcgcttctgggctgccttcttgtaaaagaaacagacgaaggcacagcgtcaggctatattgtggaaacagaggcctatatgggggctggagacagagcggcccacagctttaacaaccgccggacgaagcggactgagatcatgtttgcagaagctgggcgggtatatacatacgtgatgcacacccatacattgctgaatgtcgttgcggcggaagaggatgtcccgcaagcagtattaatcagggcgattgagccgcatgaaggccagctgttaatggaggagagaaggccgggcaggagtccgagggaatggacaaacggaccaggaaagctgacgaaagcgcttggcgtcacgatgaatgactacggacgctggatcacggaacagccgctttacatcgaaagcgggtacacaccggaagcaatttcaaccggcccgcgcatcggcattgacaacagcggggaggcacgcgattatccatggcgtttctgggtgacgggaaacaggtacgtgtcgcgttagcatgtttaaggaagaggcaatcaggggaatggttgagaaaaaagaagggagaatcggagctttgaaaaagatgatcaaaaccgttatcaaatgggcgccggtcatttacccgattgttcgaaaaatcatgaaggaccgcaaggcgtctaaacaaaagaatatgtccgcatctagaacagccggctgatcccggctgtttttttataggtcagttttccctctagtcctccggatgttcattgacttgccattctctccattatagaatttatatacatttcgcatcccttcatcatcctttctgcctattcactgaatccctgcatctactagttaggaggtttttctcatgcttcatgggcgactacgtgatattctgcgcttgctgatggcggctgaagccccggtgacaagttcgttttttgccgcgcaattaaacgtaacgacgcggacagtccgcaatgatataaaggaacttcaaggtgtgctaagcggccacggtgcctttgtacaatctgtaagaggctccggctacaagctccgcattgatgacgagcaagtattcagaacactgctgcaagatgaatttcagcaaaaaaagggcctgccggtattgccggaggagagaatggcctatcttatgaaacgtctgctgctggcggaccattatctcaagctcgatgaacttgctgaagaactatttatctcaaaatctacactccaaacggatttaaaggaagtaaagaaacgtctgctgccttaccgcatcgtcatggaaacacgtccgaattacggcttcaagctgcgcggggacgaggtgcagatgaggtactgcatggcggagtacattgttgatgaaagagaaacggagatagatgttttaaatgaaaaggctgatattttgccaaaagaagaaattgagatcatccgttccgccatcttgaaaaaaatgaaaaacgaccgcatccctctgtccaacatgggactgaataacctcattatccatatcgctatcgcctgtaaacggatcagaacggaaaactatgtttctcttttcccgaaagatatggatcatatcctgcatcaaaaggagtaccaggctgcagaagccatcgtaaaagagctggaatcaaagctttccgttacgtttccgaaagacgagacggcctacatcaccatgcatctccttggcacaaaacgaatgacacaatcacaatgcggagaggacacattttcaatagaagaggaaaccgatcagctgacacttgccatgatcaaagctgttgatcgtgaactgaagcttggcatcctgcatgacaaagagctgaaaatcggcttggcactgcatatgaagccggcgatcagccgcaaccgatacggcatgaatcttcgaaatccgatgctggcagcgatcaaggaacattatccactcgcttttgaagccgggatcattgccggaatcgtgataaaggaacaaacgggtattgagattcatgaaaacgaaattggatatttggctctccactttggcgccgcgattgaacgaaaaaaaacagaaagcccgccgaaacgctgtatcattgtatgcgcatcgggagccggaagcgcccagcttctgcgcgaaaaactgcgttcccatttcggcaagcggctcgatattcttggaacggctgagtattatagtcttgatcaaatgtcctacgaatcaattgattttgtcatcagcaccattccgattaaaaaagagctccctgtaccagtactgaaggttaacaccatcttaggcggaactgactttacaaaaatagaatctattctgagtgatgaaaaggaaaaagccaatcgctacctaaaaaaagaactcgttttttttcaggaggatctgcgctcaaaagaagaagtgattcaatttttagggcagaaagtggtcgaatgcggctttgccgatgaagaaatcatagattccatttttgaaagagaagacatgtcgccaacgtgttttggcaatcttgttgccatcccgcacccgcttgttccgcagacgaaaacaacgttttgggccgtttgtacgctcaaaaaaccgatcgattgggagagtcagcgagttcaatttgtctgtctgctttgtgtcgaaaaggagaacaaagcggatttacaaagcatgtataaactgcttggcagcattttggatgacccggcggcgatgaaccagctgatcaaatgccgttcatatcaagagctttcggatgtgtttgaccaaaaaatgctgagctgacagcctgtatataccttttttccgttgcctgcggaaaaaccctgagtgtttatgaaagcgatttcataatatgatgatagcaacagcaggacattacaaaattgatcaaactctagggggtcttttacatgaatatattactcgtttgtgcagcaggcatgtctactagcttactggtgagcaagatggaaaaaagtgcgcaggaacagggaaaagactataccatttgggcagtttcaggcgattctgtacaaaatcatatcgataaagcggatgtattgcttctcggtccgcaagtccgttacatgcttccgcagctcaaaaaattaggagagtcaaagggggttccggtagacgtcattaataccgtccattatggaacgtgcaatggggcggaagtgctgaaatcagctgaacagcttggacatgtgtcatagagaggggcgggctatgtgaataaagtcaatcagatcttagaagaaaaggtcatgcctatagcgggaagaattgcgggacagcgtcatttgcaggcgctgcgtgatggtatcatcctcacgatgcccctgattatcatcggttcctttttcctcatcattggcaacctcccgatcccgggatacgctgagtttatggcaaaaacgtttggcagctcctggtctgaaaaactggcctacccagtcgacgcgacctttgaaattatgggtcttgtcgccgcgttcggcattgcctaccggctcgccgagaaatacggtgttgatgccttgtcggccggagccatttcccttgcggcatttttattagcaacaccttatcaagtgccgtttatgccggatggcgcgacgaaagaaatcatggttggcggcgggattccgctttcgctcatgggaagcaaaggcttatttgtcgccatgattatcgcaatggtgtccacagagatttaccgccttattatccagcgcaatttagtcttcaaaatgccggacggtgtcccgccggcggtaagcaagtcatttgtcgcgttaatccccggctttgccgtcatcttcctaatttgggcagcccggctgattgttgaagcgacaccgtttgaaagccttcataatattgtaagcgttttattggggactccgctttccattctgggaggaagccttggaggaagccttgtcgccgaagccgtcaaaatgcttttatgggcctgcggccttcacggtgcaaacattgttggcggcgtcatggcaccgatttggtacggcgcaatggatgccaaccggatcgcattccaagccggtgaggagcttcctaagattttcacccagcaatttttcgatatctgggtcaatattggcggaagcggcgccacattggcactggttgtcacgatgttcctgcgcgcccgaagcaaacaaatgaagcagctcgggaagcttgcggtcggcccggccatcttcaatattaacgaaccgattatattcggaatgccgatcgtcatgaacccaatgctcttacttccgtttatcatcacgccgcttgtcacagtgacactcacgtacatcggaatgagcaccggccttgtcgccaaaccggcgggtatcgcagtgccgtggaccatgccgccgatcttttcaggctacttggcgacaggaggaaaagtctcaggcgcggtcatgcaagccattaatattgccgtgtcctttgttgtctactatccattcttcagaatgtgggataagcagaagctgaaagaagaaaacgatctggagctggtccaaacgcctgcagcaacagatgacaaagaagcggctctgtagagaaaggaagtgaatcgcgtgaatgaggaaatggaacaaatcatttttcaaatcatccttcacggaggaaacggtaggagctccgcaatggaggccattgccgctgcgaaaagcggtgacgcagaagaagcgcggaaaaagcttcaagacgctgctgaagaattgtcaaaagcccatcattatcagacagagctgatccaaaatgaagcgggcggagaaaagacggaaatgacgcttctgatggttcatgcacaggatcatttaatgaatgcaatgacagtgaaggatatggctgcagagatcattgagttatatgaaaaaatcaccgagcaaaggggagcaagcatatgacaaaaggattgaagattgtaacgattggcggaggttcaagctatacgcccgagctagtggaggggttcattaaacggtatgatgagctgcctgtccgtgaattatggcttgtcgatatccccgagggcgaagaaaagctgaatattgtcggcacactcgccaaacggatggttgaaaaagctggcgtcccgattgacattcatcttacgctcgaccggagaaaggcgctgaaagacgcagactttgtcacgacccaattccgcgtcggacttttgcaggcaagagcaaaggatgagcgcattccgctaaaatacggagtgataggccaggaaacaaacggcccgggaggtctgtttaaaggattgcgcacaattccggtcatccttgagatcgcaaaggacatagaagagctttgcccgaacgcttggcttgttaacttcacaaaccctgccggcatggtaacagaagccttgcttcgctactccaacctgaagaaagtcgtcggtctttgcaatgttccaatcggcatcaaaatgggcgtagccaaagcgcttgatgtagatgtggaccgcgtagaagtccaatttgccggactgaaccatatggtattcgggctggatgttttcttggacggcgtaagtgtgaaggagcaagtcatcgaggcgatgggcgacccgaaaaacgcgatgacgatgaaaaatatctcaggcgccgaatgggaaccggatttcttaaaagcgctcaatgtcatcccttgcggctatcaccgttactattttaaaacaaaagagatgctggagcacgaactggaagcatcacaaacggagggcacccgcgctgaagtcgtacagaaggtcgaaaaagagctgttcgagctttataaagatccaaaccttgcgatcaaaccgccgcagctggaaaaacggggcggagcttactacagtgatgcagcatgtaacttaatcagctccatttataatgataaacatgacattcagccggtgaacacgatcaataatggtgcaatagcgagtattccagacgattccgcagttgaagtgaactgtgtgatgacgaaaaccggccctaagccaattgctgtcggcgacttgccggtgtctgtccgcggccttgtccagcaaatcaaatcctttgaacgtgtcgcggcagaagcggcagttacaggtgactatcaaactgcgctccttgccatgacgattaacccgcttgtcccgtccgatactgtggccaaacagattttagacgaaatgctagaggcgcacaaagcgtatctgccgcagtttttcaacaaaattgaagcgtaaaaaaagccggcctgtaatgggccggcttttttcttacttgctttcagtcagcgctgcgacttcggtcgtccatccgaattcgtctgcgacagcgcctttttgaatgcctgtaatcgtgtcatatagtttttttgcgatttctcctgtttcaccgttgttgatcgaaagtgtttcatcctgccagatcagctcgccgactggggaaataacagctgctgtacctgttccgaaggcttcttccaggatgccgtctttatgggcttggatgacctcatcgatcgcaatttttcgttctgaaacttgaaggccccaatgcttaagcaaggcgatgactgaattgcgcgtaatgccttccaggatgctcccgttcagcatcggtgttacgatttcaccgttgattttgaagaagatgttcatgcttccgacttcttcgatgtatttcttctcaatgccgtccagccagagtacttgagaaaatcctttctcttcggctacctgctgcgcttttaagcttgaagcatagtttcctgcggttttggcatttcctgttccgccttttaccgcacggacaaattcactttcaacagcgattttgaccggcttaatgccttctttgtaataagagccgaccggagaaagaatgatcaagagcttatacgtatgagatgccgcaacaccaaggaaaggctcggttgcgatgatgaacggacggatgtaaagggacgtgccctccgcatttggaatccagtctttatcaattgcgacaagctgctttaagccttcaagaacctgttcttcatcaatttgcgggatgcagaggcggtcgtttgattgattcaggcgttccatatttttttccggtctgaaaagcagaacatggtcatcctctgacacgtaagcctttaacccttcaaacacggtttggccgtagtgatagaccattgcagccggatccattgataagggttgataaggaatgattcttggatcgtaccaacctttatctgcggcatagtccattacaaacatgtggtctgtaaacactcttccgaacgaaagctgatttgggtctggtttcggtttttttgttgatgtcaattcaacgcgaattgtttgtttagtcatggtcaatctccctgctgttaaattgtttatattatcaaacttatttgaaaataattatattctattgtataccttcaacaaataatcgcaataggtttgctcaaatttgtaagaaattcatatgaaaaaagcaggagaaattaattctcctgcgtgttcatttgctcgaataacctgtcataatcggcgcgagtggcatcccgaagaccttcaacacgttcatttgtaatctcctgtttgccttccttcaagccgtccaagaaatattgaacatattcttcagatgaaatgccccggtacgtcaggccttgtttatcgcgtgatttttggtttaagcccgtgtccaccataggcggtgccatttcaatcacttccacgctcgtgtcgcggagctggtgtctgagcgtaagcgagaacgagtgaagtgccgcttttgttgcgcagtacaccggataaacagctaacgggttaaacgcaagcccggatgtgacctgaacgattgccgcctcgggctgcttcatcaaatgaggtgtgaaaagggcggataaatggacaggcgcttggaaattaagttcaatttcatcaccgtccacaaaaagctcctctgtcccttttttaaagtcaatttccttttgaatgccggcgttgttgacgagaacattcaagttcggatattcctttaaagcccattcatacaatgcttcccgctgcgaacggtctgcaacatcacattgctttgtatggatgtttgggagctgctgcttcgcttctgcaagacgtgcttcgctgcgtccgcaaatgataacttcattgccaagttccagcaggcgcttggccagttcaagcccgatgccagcagaaccccctgtgattaaaaccgtattatttgtcatcttcattggatgtaacacctcttaattaagttggctgtgattcctttactattacaaatcttagcaggaaatatgcagccgcgtcctatgagatgctcaggatgaagtgacttttccggttttataaaattcgtcaattgctttatcgacatacacccagcctttccagccgatgtgaatggtgtctttcatgaaatacgggtcatattcatgccctgagaaatcagcaacctggaagcccttcgctctgatttgtttatttacctttttgtaatagtcagtgcgtccttttttcgggaagcccgtgtaatcgtaccatttcccgttaacaggaatggtgacaaacataggctctgcgcccgcatccttcaggatatcgagcatcatttcaaagtcgccatattccggtgacaccgcatacgatcttcctttgtttttccctttcagcttaggcactttcggcttcagctttttatagacagggttgtcgatgtgaaaatcgttagaaccggagtggcgtttgcccgattgatccgctagtttattcaattcagaccatgacttatcctttactgactgcgagatatagcgctttggcccggatgattctgtcgttgaataatacagatctttcttttccagcatgctgtaatacactttcgccgccggcttcagcgcgttcactttccacgtctgaccgtttaccattgctttgtacagctcagaaagaatggcatcgttttgcacagccttaaagcgaagcatgcgtttcatcattttctttttaatttcaggatcgatctgatcgttaaatgccaaatcaagcccttgcagcgcagaatagttcggcgcgaaatgctgttcatcagacccgcgcttaataaaccattgcggagacacgatgaatacgatttttttgcccttcagctgatccatgtgggcagcgaagtttaaagaatgaatcaatgactgggatccgcctttgccgacaaggtatggcgtgaatccctcattgtttacctgaaaataattagatgggtggaactcgtccagccgagaaagctcagaagacccgtaaatcggaagatatgtcggatctttgagcatctgatcttgtaaatatagcccttgaaacatactcggattcaaggctgttgctgactctttcacacgcttatcggtgatgaagcctgtcagccatgaagatggaattgcgatggcgcctgcgaatagaataaacgccaaaataattggaccgaaaaaacgctttttcattatttcaactcagacagctgatttacaatgttgttaggtgtattccaaacgtcccggtcaaattcagtgatcggcactaaaatatcaaaacggttttcaatcgcaagcagcaattctactgttccaaaagaatcaagcaaaccttcttcaaaaatttcaatatcaggattttcctttacgatgtcatcctggcaaacctctgctaaaacgtctaatacctcttgtttaaaatccatagctttctaatctcctttaatggtggtgatgaaatggttttcctgagaaaatataaaacccgaagcaaacgaaatggaatgtgatcacaatagcgagaatggttgtccagcggttggacggcagccatttatatttcttattccacttctcgaaaaagttgtaacacgtcatcagaacggcgtgatagaggccgtaaatgatatattgcggcgcgagcccgtgccaaacccccatcagcataaacagcaggaaatacccgatgtttgagacggccatacggtttttgatccactttttcttagtcatccaaaatacgaatctcataaacacataatctctgaaccaaaatgacagagacatatgccagcgattccagaaatctttaatatttttactgataaacggtttattaaagttttctggtgatttaatgcccataatgtagctgaccccgacggcaaacatcgtgtagccggcgaaatcaaagaataaatacatgctgtagccgtacatgtacagcaggttcccaagaatcttattgtgcgtgattgcgggaagattcatgatgaagtacgtattgatcgcgtagccgataataaatttatacaggaaaccgatgaagattttatggattcccgtatacagcaggtcggcgtattcttctttcgtccaagccttctgttcatccttgacgaaccggcggtatctgtcgatcgggccggaggaaatcgtcgggaaaaacaggatgaaatacagcagacggtgcaatggcagctgttctttcagcagtccgtctcttgcttccataatcagctgaacgcctttaaaggttaaatatgaaatccctaaaaagctgatcaggttatgcggcggatgatgcggctgcgggtgtgaaagaaacggccatatttttgacagaaataaaggcagaatagacgcgataacagctccgcaaaagacaaagccgctgttcgctttctgccggtatgccagatagccgctgatcaggagcacctgccatattgtaaacaggcacagcgcgatgaccccgtgtaagtcgtgcgaaaaaattaaagccaatataatgatagatatgaacatgttgtatgcttgaaatctttttccgtttaagccgagaatgatcgtcggcagaagaagaatgccaagcagtataaagaataaaaacgagctgtaaggcgtcatacaagaacctcttcgccaatgcgttttcggtcaattttgccgttagccgtcatttgaatgtgatcctgatagataaattttctcgggatcatatatgccggaagagaagcggcaagctcttttttaatagcgcttgtcagctggaattccttctcgaactcatgctcctcaggcacaatagcagcgatcagatactcaactgttccgtttggctgataaggaatcacgacagcagaacgaacgtactgtgactgtctgacatggaactcgatttcctccagctccattcgatagccgtgaagtttaatctgaaaatccaaacgtccttggcagaaaatctgaccgtcttgaataaagccggcatcgccagttcggtatgcccactggccttcatgagagaaaaacgctttttccgtcagctctggctcaccaaggtagcctcggcttacactcggccctgcaatgacgatttctcctttttctccctcaggaagcggctgtccctcttcatccataatgaaaatgttcatatctggtttggcgaagcccactggaagcgattcgctgcggctgatgacgtcattcgtaatttcaaccgatgtgacagccactgtcgcttcagtcgggccgtacgtattaaaaatcttcgctttcggaaaacgctcaagcagcgctttggccacagaaaccggaagaacctctccgcaaaacataaatgtgtccgcatgaggcagcagatcctgtgaaaaacccggatccatcaggcacatttgcacaaaggaaggtgttgatgtccacacattcagcccggacttcttcagctcttcaaataagactttcggcttattcacagcatcctttgtcacgcaatgtaaagtcccgcctgattgaaggcacggatataggtccatgacagacaaatcaaatgagaacggcgcttggtttaaaaatatttttcctccgctgactggaaagtctgcacaaatccagtctgtgaagctttgaaggttcgcagcggaaatctgcacgcctttcggatttcctgtgctcccggaagtgtaaatgatataaaacgtttcgtgttctttgacccattgatcttggctgacagagccgccttcgttttccagcagttcttccgcagaaactgtctgaatctgctggccgactgcatcaattgagagtcctgctgcatggatcagcaattctgctccagagctttcgataattttcgcaatccgttcggacggaatagacaggtcaaccggaatataaggatgtcccgctttgacacttcccaagaaggaaacgatcatgtgcggctccatgtggccgtacacaaggataggagatttcttttccccagaaatgcgtttttggatcgcggcagccgcgcggtcagactgctcccataattcctgatacgtgagcgactggccttgagagcggaaggcatcggtttgcggataagtttccgcatgtgtttgaatagcatgtaaaagtttcatagttattctctctccaattagaaatcgttataaatatatgaaccggtattcgcggtgtgaaaaccatacataaaaaacaaaacaagcagtatcatcaaataaaagcctgtatgacatgtccacttgacagcgggtttttcatacagctgtttcattaattgcagcatatcaaaaattcccttcccgttttttcgacaatcacatgattatttgacgatcagatgctcaaaaagtttcattttttccctaatctccctcaaattaatatatcggcgtatgtttttgaaaatgaatctttatacctgcaagggcaagaatggaatgtttcgagctgattcataataaaggaaaagatacctggagtcaaaagatctttttaacttttaaaaagtgtaatgtacttaaaaaaatttttctgtacctgttcgttcaagtgaaagcagaaacctaatgaaatcagggcgagaagcgtataataagaaagaaaacgccttcttgcggtatcttgtgaaataagggagaagtcattatgatagataaggaagcaaaaggagttttttattaagctgccggctgaaaaaaagtaagccttttaatagaaaggaagaggaagatgaaccaaacaaataagggtgagggtcagacagcgccgcaaaaagaaagcatggggcagatcctttggcagttaacccgtcctcatacgttaaccgcatcgtttgtgcctgtgctgctcggaaccgttttggcgatgttttatgtgaaggttgatctgctgctgtttttggctatgctgttttcttgcctatggatccagatcgcgacgaacttatttaatgaatactatgattttaaacgcggattagatacagcagaatcagtcggaatcggaggggccattgtacgccacggaatgaagcctaaaacgattttgcaattagctcttgcctcatacgggattgccattttgctcggtgtctatatttgtgccagcagcagctggtggcttgcgctgatcggccttgtcggcatggcgatcggctacctgtatacaggcgggccgctgccgattgcgtacacgccgttcggtgaattattctcaggcatttgcatgggttcggtgtttgtgctgatttcgtttttcattcagacagataagatcaatatgcagagcattttgatttccatcccgattgcgattcttgtcggcgcgattaacctgtcgaacaacattcgtgatattgaagaggacaaaaaaggcggacgcaaaacattggcgattttgatggggcataagggagctgttactctgttagctgcgtcgtttgccgtcgcttatatctgggttgtcggcttggttattaccggtgccgcaagcccatggctgtttgtcgtctttttgagcgtgcctaagccggttcaggcagtgaagggcttcgtccagaacgaaatgccgatgaatatgattgtcgcaatgaaatcaacagcccaaacaaatacatttttcggattcctgctctcgatcggattattgatcagctatttccgataataaaaaagaccgctcgtttcatgcggtctttttttgttacaatcgaccgcattttgtaaaaaaattcatagaaccttgcagcagacagggacgtctagtacatggacagcggataaagttccgttaaaggagatgacgaacatggatttatctgtaacacatatggacgatttaaaaacagtaatggaagattggaaaaatgagttattagtttataaatttgcgctagatgcgctcgatacaaagttctcaattatcagccaggaatataacctcattcacggacacaacccgattgaacatacaaaatcccgtgtaaaaagctttgaaagcatcgtgaataagttaatgagaaagggctgtgagattacgacgaaggaaatgaaggagcatattcacgacattgccggcgtgcgcatcatctgttcctttatttctgacatttataatgtcgtgaatgtgttgaagcagcatgaagatttgagaatcgtaaaggtaaaggattatatccagacacccaaaccgaatggctatcgaagcctgcatttaatcattgagatgcctgtgaatttaacgaaccgtgtggaatacgtcaaagcagaaattcaaatccggacaatcgcgatggatttctgggcgagccttgaacataaaatttattataaattgaacaatgacgttcctaagcaattaacagatgagctgaaagaagccgcggagattgcccattacctagatgagaaaatgctggggattaagaaagaagtggattaaaaaagacggcacccaagtgccgtctttttttatttgatatcttcaaaaatgtcagatgctttcgccttcatttgtttcttaatggttttcggtttcttctcttttttcacagcctcatagacagcggctgtcacaagatcgcctgcttgctggaggcgttctttgctgatatgttcgatcgagtcttcaggggtatgataccacggctcaacttcttctgtttccgggtctccccaaataaagttagcggaatcaatgccggcttcgtggaatggcacatgatcagatgatcctccctgtgtcagagacaggctgtcaaacccaattttttcagcagccgtacggctggattcccaaacatagttagattggccatccaatgtgttgacatacagctcagacgctttttcccagcttgtgcctaccatatctaagttgaagttcacttcgcttcgtttcagctctttttccgatagatgatctacatagtgagaggagccgagcaggccgagctcttcggcgccgaaagcgataaagcggatttctttatcagatggaacgctttttaagacacgcgccatctccagcataacagaggtacctgagccgttgtcatttgctccgggcgaaaaaggaacactgtcgtaatgggcggtcacgtacacaatgtctggatgtttgatgttctttggttttttgattccgatgatattctgggaggtttggtttgtgaatgcttttagttttaaggtggcttctttttgctgggtaagtgcttcgccgtcttctttcttaatgccgacgaccggaatgccgactttatttcccgacaggtttggcgtcataggcacgaggctttctttgttgttataaatgatgacagctttcgctccggcggcttcggcatttttggctttctcgtaataagtcaggtctcctctggaaatcaaggcgattttgcccttggcgtcagcggtaaagtccttttgatagcccaatcccgcattgtaaagcggggccgtcagcccttgttcctcagtcggagctgagcccgacgccgcttggagaagaatatcgcgtcctgctgaagacagtgtaccctcaagccggtcaggaatgttgaatcgttgaaccttcacatcaagctttaattttctcattgatgaggcgatcaatagggcactctttttttcagctgcagttccggctattctggggccgattgcttcacttagctgagaaatggtagagtacgcatgttttgctttgaatggaagctcgcgctcgctatttgatatttgtacagcgtgcgcggcaggggtgacactctgtgccggcaagagcagtgtgccggcagttaaaacagccatcgtcatgacagtcaaaagctttttcatcaaaaataaacctcccctaaatgtatggttggggaatatttcgggatgctaaaggagtttcctgcaagatggagagcgtttttgaaaagacagtgctttatacctgcaaaaaaacgcttatgaatgaagggtcataagcgtttcggaatatcagattattggagctttaaaaacttgcgtttgccgacttggatgatcatattctctcttatctctgctttggcgtgaacatctgttactttctctccgtcgatgcgtacacctccgttttgaatcatgcggcgcgcctcgctcttcgaagagaggagctttagcttgacgagcagatcaatcatcgctatcgttttttcgcctttccagtttacggccggtatatcttccggcaggctgttttcctgaaagactgttttaaacgagtgttcggcagcttctgctgctttctctccgtgatacattcggacgattgttctggctaaaagcattttggcatcacgcggatgaacggcgccggtttctaagtcttttacgagctgttttttctcttcaagctctaagtctgtcgccaagtggatgtactttttcatcaggctgtcgggcagtgacatcgtttttccgtacatgtcgtttggatgttcgttaatgccaatgtagttgtgtttcgacttcgacattttctcgacgccatccaagccttccaagagcggcataaggatgacgacttgtttttctttgttgtatcgttcttggaaatgccgtcccatgaggacattgaaatgctgatccgttccgcctaattcaatatcactttcgagaacgacagaatcatagccctgcatcaatgggtaaaagaattcatgcagtgagattggtttttgcatggcgatgcgttcttcaaagtcgtcgcgctccatcaggcgggctaccgttattttccctgctaattcaatgacatcttctagattcaatgttttcagccattttgagttatagtgaagctcgactttttctggatcaagcacttttccgaattgctcaaagtaggttttggcattgtgctgaacttcttcatcagtcagttgctttctggctgccgattttccggtcggatcaccaatttttcctgtgaaatccccaattaacagctggacaatgtggccgttttcttgaaattggcgaagcttatttaacacaaccgtatggcccaaatgtacatccggtgcagacggatctaatccgagcttaattttaagcggcgtgcccgtggaaattgatttcacgagctttgcctttaattcctccggcggtatgacttcgtgggcgcctgtcatgtatagctgaagctgtctttctacctctttttgttgtgacgctgtgagctgctcaaatgttctcatcatttttcctccttttttacaaacacaaaaaagagcccatcccaataagggacgtggctcaatgcacgcggtaccaccctggttgaagacattgtcttccgctcattcgaataacggtttcccgttctttgctactaaggttcacaaagaaagcttggggaggtaattcacgtttgcctgtgcgccggctcgcacctaccgccggctctctgaaacagggagacaaaccgctactggattcccgtcaaagcttatgttgtatgaagattgtcagctacctttctaagcagccctgtcaatattttctgttcgtccttcgtcattcccgcaatgagctctgtttcccctttgtgaaactccgggtagagttcttcgatcgcttgtttgccggaatcggtgattgagacaaacacgagtcgccgatctcttgtgtcgatgcttttacggcaaaaactctttttttcgagcgttttgatcacgttgcttgctgtagctgtagatatccctgacagctcagcgatttttctcgtttcgagcgctccccatacccatagatcataaagaatggagaaagcggtccaagaaaggttataggtagaaagaacctcagtctccattttgacacggagcctttgtgcagaccgatacagattcgtagcgatcgaaatggcttccaggttgagtgactcgacgggcatttgtttgagcttagaaagtgtatcgtgttcttccttccgaagctgctgatgttgatgtgaacgttccattttttaggcctgccttaaattatcagaatcattagctatgaaacgaattttaacagagtctggtgtgaacttcaagcccatatatcggttgaataaaaaaagcccaaacaacgccaaaataaacaaaaacccgaaaacgggggtgcagttttgcaaaaatatgttcaatccgactataagcatgatccgtttcatctgttttcgacagagcatgtagtgacgttagcgattatctcccttttggccattctgttgtttttgttccaagatgaggtcaagcagccgagggccagccggtttttgcgttctctgtttgtgtttcttttgcttggttcgcaaatcggctatcaaatatggatggtcgccacggacaggtggtcggtgcgcacttcattgcctctccagcttagtgacctgtcggtgtatttgtcagctattatgttagtgacaaaaagcagaaagctgtttgtgtttttgttttttgtcggcatcggcagttcgattcaggctcttgccactcctgacctcggtatgttttcatttccgcatatccgatatatcctcttttttatttctcacgggtctgtgtttttatcctgtctgctgatggctgtgattggcacctacagaatgggccagcgctcgttatgggtgacagtcctgcttgttaatgtgtacggcgtctgtatttttctgattgatcgctggcttggcgcgaattatatgtatttgacgaaaaaaccgggcggttcctctctcttagatgttctcgggccatggccgtggtatatcgtctcggctgaagccatcacaatcgcaagctttttcattctttattggctttatcgcatcttcaaaaaatgacaccttttttgttgtatcacacattctgtttaaaaaaatgtcggagaacgtgtttatttttttgaaaaagggtatgtaacttgtacaacaaaaagggagatgaataccattgaggaaagatgaaatcatgcatatcgtatcatgcgcagatgataattatgctcgtcatttaggtgggatgttcgtttctttattgactaacatggatcaggagagagaggtaaaattatacgtcattgatggcggaattaagcctgataacaaaaaaagactggaagaaaccactttgaaattcggagtgccgattgagtttttagaagtggataccaacatgtatgaacatgcggttgagagcagccatattacaaaagccgcgtattaccgcatttcgattcccgacttaattaaggatgaaagcatcaaacgaatgatttacatcgattgtgatgcgcttgtcctagaggatatttctaagctatgggacttagacattgcgccatacaccgtagccgctgttgaggatgcggggcagcatgaacgcctgaaagaaatgaacgtcactgatacagggaagtattttaactcaggtatcatgattattgattttgagtcttggagaaagcaaaacatcacagaaaaagtcatcaactttatcaatgaacacccagacgaagactttcttgtgctgcatgaccaagatgcactgaatgcgatcttgtatgatcagtggtatgaacttcatccgcgctggaacgctcaaacctatatcatgttaaagctgaaaaccccatcgactctgttagggcggaagcaatataatgaaacaagagaaaacccggcaatcgtgcacttctgcggcggagaaaagccttggaactccaatacaaaacatccgtatcgcgatgagtatttccattacatgtcctatacgaagtggaatacgattgggaatccggcgatcaaccaataaatcagataaaaaaacgcttttgagatgatcaaaagcgttttttgtttgtctcagcgtgcgactgaccgttggtagaaccgctgaatatgcatggcgatgtagcacaattctttttcaggaaactcaaagccgtattccttcttcacaaaggtgccgatgcttagggcacacaggaaggcatccttaaacttctctttaatgatgtcaatcatttctgcgtccagctcgtaaatggattcgcctgctttgatatgctgaatggcaaagcggagatgggtcacgagcctttcataagagatggtatcttcaacgatattaatagacagttgaatttcgataatctcgataatatcacggatcattgttgtaatatcaagcgtttgtgtcatatcgccggcattgtttcttgctgtgtggatatgcatggcgatattgccgatttcatcatcaggaatgtgaatccccagtttatctttaatcagtgctctggcccataagccgatctggaactcctttggataaaggactttgatttcattcagcagcggatttttgataaccatcccattgctcaggcgttcaattgcaaaagaaagatggtctgaaaaagcgacatgaatgcgctcgttgattttgatgttcagctctttttcggcatgagagataatttgctcagaaatctgaatgtggtcttcaggcaatgtttctaaaatctcttcgaactgcttatagtcaggtgtatcttttctgataaaggttttttctatttttgacggatcgacaatatcattcttctttttgttaaacgcaattcctgcacccaagagaatcttctcttcattttgatcctttacgacgatagcattatgatttaagattcttttaattttcatagcttttttgtcctttcatcccccgttttatgaatgaaatcgaataaatccagttattctgtctcttctttaaacccgagaaacaatgtagctataaaagcagagacggctgcgatcaagaaaccgatcatataatgaacaaaattagcggcgccaaacggcagcacgattgaaatcatcggaatgcctgtcagtccgtaggaatttgccacaacttgtaccgcaaccacgtatgctccgccaatagcaccgccgatggctgctccgataaagggacggatcaatttgagatttaccccgaatacaatcggctcaacaatgcctaaaaacgcggtcagagaagcggggagcgcaattttcttcaggcttgattgtttcgttttgaggaataccgcaagccccgctccgccttgggccacattcgccatcgaccatatcggcactaaaaagttgacaccgacatgcggattagcaagcagcgttgcctcaattgcataaaagctatgatgcaatccagataggacgatggtggagtagatgccgccgaaaagagctccggcagcaatgccggcgtgatcataaatatagacgatcgattgtgtcatgatctggccgatgatggacgcggcgggattcatcacaatcagcgcgaggcaccctgtcaccatgaccgtaataaagggaatgatcacgacatcaagcgacttcggcacaatcgattttaatagcttctcaattttgctcatgacaaaaacggaaagaagaatcggtatcatggaaccctgatagcccatcattgggatatgaagcccccatatgtctaaagaagacggggttttgctgccgagcatagacgggtccagcagatcaggatgcgtcaaaagccctgcaatcactgcccctaggtatgggttgctgccaaattgccgtgcagcactgaagccgactaaaatcggcagtaaaataaaggctgtgctggacacgaggtcgagcattttaatccatgggctgccggcagcgaaccaatgaaacaccttaatcatgccgatcagccccatgagcaggccgcttgctgttattgccggaataatcggcacaaaaatatcggacagtgttttcgcaaaagctgcggcagggttcagcttccggctggcttttttctggtggacaggctcttcagaaggcgcggtctcccatacatgaacgacttctttatatattttgttgacgacgcctgctccgaagataatctggaaaagcccatagcggaaaaaggtgccctgcacaccttgcaggttctcaatggcatgtatatcaattttcgtctcgtcctttacatcaaaacgaagacgggtcgtacaatggctgatgctgataatattgttttttcctcctgcgagcagcagtaattcttttgcaatctctttatgcaagcaattaaaacctcctttgctgaagaaaagtcggcttgttcatcgtatcaaatgaaaagttgacaatcaaaatgaaaaaagtgagaaataccggctgaaaatgacaaaaatgcccgcgtcgacgacggagcatgagaatagggggttgtccaaggcgccgttatgagcccaacacgaaaagaagagttaaaatgccctgttttttaggcattaatactccctttgcatcattgggtcttgcctgcctgcccagtcacaatcccgccatatgtggtgataactgtaataacgttcattttatgctgttcatggctgtatagcaatagtatgaaaagcctgtacaatggatgggaaaaaggttgtgtgtggtgttcttagaatgaaaaaaacctttaagacttggaatgcaaatcttaaaggtttttggttactttttcggtttgacggcgttcagccgtttttgcagctttgttttttcattggatgcttttaattgattcactgcagactgagcggatgtctttgatttctttgttttgtctttttccgctttcttcacttttgcctttgcagtttccactttttttgcttcagccgccgccacctttttcttcactttgtctaaccgtttttgcaatgccgttttgtccttgcctgcttgaagctgattgacggctgattgtgcttttgccgcatttgcatcagttgatttcttttcagccgcagatacggattgctgtgccgtcttcaaattggtgctcttcactttgttaaggcgtttctgcagggacgttttttctgaacttgcaggcagcttgccaattgctgattgtgcgctgtccacatctgttttctttttgcttttttccgctttcgcaactttgtctttcgcttgctttgacgcgatgtatcgttttacttggtctaagcgtttttgaaggttctttttgtctgttccgtttggcagcttgttgatggcagtttgtgctgtgtcaacggtttgctgtgttttatatttttctgcctttgcgactttgtctttcgcatcttttacatttctgtatgactgtactttatccagtcttttgtgcagggcagttttggcgtcggagttcggcagctggctgatgagttctcgcgctttgttgatatcgatttgtgcttttgtttgttccgcttttttcaccgcttgctctgctgccgcgtacgctgaatctgttgcctgtgctttatactggattaagccgtagccaaattgctgatcgcggcctgcggtaccaagatcaacgatgtttttccgcatttcctcgcgaagctggacgtttgtctcggcaggatcacgctgttttaacaaggcaaacatggcagcggcgtgcggtgtcgcttgggatgttccgcttcccgttgcataatactggtttaagtaagtgcttgtgatgtttgtccccggtgctgaaaattcaacttcatctccagttgttgaaaaggaggcaagctgattcttttcgtttgttgctgaaaccgcaacgacactgctgtatgccgccggataattcactggcttgccgtttccgtcgttaccgcttgcggcaacaagcagaacaccttgttcatatgctttgttcacggcgtcatgaaggattttgctgtctgacgtcgtgccaaggctcatattgacgatgtccatcctgtttgcgatcgaccagtcaattccttggagaagactttgaagatcccccgagccgttctgatcaagcgctttaaccgcgtatatttgtgcttccggtgcgatgccgtcaattccgtagccgttatgcttggctccgataatccctgcgacatgtgttccgtggccgttatcatctttgtaagaagaggtataactgacagctgaatacccgccggcaatcgacaggtcatcgtggggggagatcccgctgtcaatgacggcaattttgatattttttcctgtcagtcctgccttccaagcctgtttcacctgaatgggctcaaggttccattgctcaaagttgtcagaggtgtcagtgccgtctgacagcactttgaaatccgtgctgtctgctgcggtaaatgatacgttgttttctacatacaaaatatcaggatcctgctttaattcttttactgtctcctggtctgctgtgaccgctaccgcgggaagatgcttatactgctgttcaacatcagcatcactgtccaggatggtttcctttccggccttgtttttataaaccacaataacctctttctcgctgctgttttgcgcatgagcgagagggcctatggtgagaaaactgaaaaacagagtgactgatacaacaagtttgcaagacatgtttttcatgattcatctcctttttctatgatgtttgatatatatatcggagaaaaaaagagagattaatagtaagaaggaaaaaatttttcatgggcagggttgtttagcaaaatgcagattttttccgcatgaagaggaaattttccaaatgaatttgtaagcgttttcaaaataagataaagaaaacattgcggaggttgttcacaaagcaatgagaaaagggggtttttaagatgagcacattcactcgggtgatggaggaaaaaataatgcctgtcgccgggaaaattgccgggcagcggcatctcagcgctttgcgtgacggaattatcctgaccatgccgctgattattatcgggtctgtcttcttgattttaacgagcttgccgattccggggtatgctgatttcatggcgagtgtgtttgggaacgagtgggccgataagctcggatatcctgttaacgcttcgtttgatattatggcgatgattgccgcttttgggatcgcctatcggctggcagaaagctatggtgtcgatgccctttctgccggagcgatttcaattgccgcatttctgctggcaacaccgtttgaggtgccgtttacaccgcatggctcaacggagtccatcatggtagggggcggaatcccgatcacgctgctcggcagcaagggcttatttgtcgccatgctgatcgccttgttttcaaccgaaatctatcggtacattattcaaaaaaatatcgtcttcaaaatgccagacggtgtgccgcctgcggtaagcaaatcatttgtcgcgctgattcccggctttatcattgtgcttctcgtatggctggcgcgtcttctgattgaaatgacaccttttcagagtctgcacaatgtcgtaggagacctgcttggcacaccgctttccatccttggcggcagtctcggcggaagcctgatcgctgaatttgtgcagatgctgctttggtcgtgcgggattcacggggcttccatcattggcggaatcatggcgccgatttggtacggcgcgatggatgccaaccgtctcgccttccaagcaggcgaggcgctgccgagtatttttacgactcagttttttcaaatttggatcaatgtcggcggaagcggggcgacgctggcgcttgtcctgacgatgcttgtgcgctcccgcagcaaacaaatgaagcagcttggacgattaggaatcggccctgcgctatttaatatcaacgagccgatcattttcggcatgccgattgtcatgaatcccctccttattgtcccatttatcatcgcaccgctcctcacgattaccgcgacttatatcggcatgagcaccgggctggtggcaagaccggccggaatcgcggtgccatggacgatgccgccgctcatatcaggttacctggcgacaggcggaaaggtgtcgggcgcagttatgcagctggtaaatctgctgatcacctgtgctatctactatccgtttttcagaatatgggatcatcaaaaatggcgggaagagagtgcggttgaatctggggataaaaatgtgatgtgatagatgatcagcctgtcatagggctgatcatctctttcaaacgaaaggaatgttagaatatgtaaaggaggtgcgcatgctagattatatatggttagatgacgaatcaccaatcttacaacaagtaccagttgaatactcatctgctgctcttatcttttctccttttatccaaatgcctgaaggatgggagaatgcaaaaagaaaaaatgattatgaacatatttatccaaacgataatgaaataagaggaataggcaaggctgtttcctggaagaaggttatgtcttcttgcggctttcaaacacatgctgagctggcgctggctttaatgacgtcgataggcgctttaagggacgagttcgcgagagaggatttggctgaggtgttacatgaaaacataaatggagacctctattatcccagtgaggatcatatttcaaattttcatattccgagtttggtaaaggtattaggtgcgaacggatccaatcggttttattacgcagaaccgattgtggaaaaccgcggcgttttggacataactgaagccaacttgcggacggttcttgatgaagccgcaacagagctcgttttaactgatgagaaaatggattttgtgtttatgagtgtatatgactcattcattaatgtctttttagccaaagataaaaacatccatgaattggttgagcgtatgggctgggaagctatgatttgcgatgagtcaacgtatatcagttggtatagataaaaaagaacgtacatcacaaaatgtacgttctttatttttaccgctgaaagaactcaatccactcaccgtcagggccttcgatatagaaataacggtatccgtttggaagtgttgtgatctcctcgtcgataaattttgcgttcattttttccgcttttgtatattcagccgcgatgtcatccgtcagcagggcaatgtggtgcacttttccttcagcgggaagctcgctgctgtagccttgaatcagttcaatttctgtttccgggccgtcttcaaagccaagaaaagcaagctcgattacaccgttcgtgtgagtgatgcgatccttcaatttcatgcctagtacctcttcataaaatgtgatggacgcgttaatatctcttaccatgatgcctgtatggtcaattcgttttgccatgctgctcctcctcgtaactctttttgtctatcgtagaaaaacctttcctttctgtcaatgcagacatcttggcgttttgtggtaccataagagaaagcaaacggaaagaggacgacatatatgaagctactcaccctaaaaaaagcacacgctgccaaaataaaaaaaggctatccccttattgaaaaagaagctctcgcagggagtgcggggcacatgaaagaaggagacctcgttgatatcgtgtctgagagcggcggcgagtttctcgcgcggggctattacggcctgcaaaacaaaggggttggctggacgcttacccgcaataaacatgaacagattgaccaagcattttttctcagcaaattaacaaaagcggcccaagcgcgcgccaaactatttgaggctcaagatacaacagctttccgcctgttcaacggtgagggtgacggtgtcggcggcgtcaccatcgactattatgacggctacctgctgattcaatggtacagcaagggaatttacacctttaaagacatgctgatttccgcattggatgagatggatcttgattataaagcgatttacgagaagaaacgcttcgacacggctggacaatacgttgaagatgatgacttcgtgaaagggagaaggggcgagttcccgatcatcatccaagagaatggcattcaatacgcggtggatctgaatgaaggcgccatgacgggcatctttttggatcagagacatgtgcgcaaggcgatcagagaccgctatgcaaaagggaaaaccgttttaaatacgttttcttatacgggtgcattctccgtggcggcggcgcttggcggagcggagaaaacaacaagcgtcgacgtggcaaatcgaagtcttgccaaaacgatcgagcaattcagcgtgaacaagctggattacgaagcgcacgacattaaagtgatggacgtttttaactatttttcatatgctgcaaaaaaggatttgcgctttgatctgattattctagatccgccttcctttgcgcgcacaaaaaaacgcaccttcagcgcggccaaggattataaaaacctgctgaaggaaacgatcgccatcactgctgacaagggtgtcattgttgcctctacaaacagcagcgcctttggcatgaagaagttcaaaggctttattgatgccgcctttaaagaaacaaatgaacgctacacgatcattgaggaatttacgctgccggaggatttcaaaacgatttcggcatttccggaaggcaactacctgaaagtggtccttctgcagaaaaaataatgaaaaagctgccctgttcaggggcagcttttttttatgtagaaacgatctgctggtcgcggccgatgcggccatcttcaagacggactttaatgccatgcggatgaaagtttgatttcgtcaaaatatccttcactgtccctctcgtcagttttcctgttttttgatctgctttcaatacaatatcaacctgcaaccctttcgaaatgctgtttcgctcttgcccgttcataacgcacatcctttcttttgttcattatagtcattatggtttaaaagtaacagccggctgatgaagtgtatgtttgtttttttcagccttcattaaatataatgtcaggccaaagcctgctatgctcagaatgccaaaaagcaagtagactgcgaagatcgacacgtagtcaaaaatgtacccgcctgcaaatgtgcagaaccagttgccgaacccgttgccaatggcggcgtacatggtcagcgccgtcgcttcaacgtgtcttggggtaatctttttcacatattgaagcgccgccgggataaataaaccgatggccactccctgaagaaagaccgtcgcataaatgatccatagtgaaggcgccgtgaaatagagcgcccacctgaataatgagactccgcctgacagcataatgacgttgagcagccccattttatctataaatgtttgggcgaatctcataaatggaatttctgaaatgacaccgatgaaaaataaaatgccgatagcggaaagtgacgcgccgcttttgtccagaaaaagactgaaatacgtattgttcgctaagtttggagcaaatgtcgtaaaggtgatgatcataaagatgaggaaagttttgttgctgataagctcccggaatcctttgcggatattgacctttgttgttttctgctggccgggcacttgtgaagccaatatggcagcaatgcacagaaaggcacagccaaagataaagatcacgtgaatggggtacagctggttcgtcacctgtcccatggcaaacaccgcgacaccgaagccgagagaaccaaacaggcggattccgccgtagttgccgtttgtttcttgtgtgtaccttagtgaaatgctgtccgaaagtggaataatcgtgctttgaaaggctgcaaaacaggccgcaatcaaaataaacagagggaaactgtcaaatgcaatataggctaatccaatgatgcctgtgattgatgtgcaaaccgccagcaggcctttcgttttttgcgtatagtcgctcagcatgccccaaaacggctgaaagaaaatcatcacaatcgggcccagtgacatgatcaagccgacctgtgatccgcttaaatgctgttccttcgttaaatacatactgagtaagggaattatgctgcccgtaccgagaaaagcaaacaaataaaatccttttaacgcggcataatgccgcctcacctgcaagttgtgcatcagggtgcctcctttggtatccacaaatacattatattggaattcgccagcttttcaataaggggaagcacataaaaaaaactgccctcgagaggacagttttttacataaatgaaagcaaaaacggcgccgcgcaaagcgtcataatcgcagctaagatcatcgacacgctggaaatcgtgccggacacagagctgagctcaaatgcctttgacgttcccgctccgtgcgcgcttgtgccaagcagcacgccccgcgcaatttcgttatcaatgcggaaataacggatgaccatcgggccgatcactgtgccgagcaaagcggttaaaatcacaaacacggctgtgacggcaggcataccgccgatcatttcagatacgttcatcgcgatcggcgttgtcactgatcttgggacgaggctgtcaattaagccggtgccgaggtgaagccatttcgcaataagagcggtagaaataatcgcgatgcatgaaccgacggccacattcaaaataatttccactgcgtatttctttaaaacagggaaatatttatataacgggatcgcgaatgccacggtggccggctgtagcatatcggtcagcaatccgccgccgagattataggactcgtacgggacattcaccagcagcagcagaccgactaatacagcgggcgtcaccaatagcggcgacgtataaacacgcggaaagcgttgatataccttttttgctcctaaatacaccaaaaccgttaaaaacaaacttacaattccgatgaacacgtatgctttttctcctttctctttgcgatgagttgtgtaagcgttcctgtagacaccatcacgacaaacgtgctgatgatgacaacaagcagaatgctgacaccaaatttcgacataatgtctccgtattcaatcactccgacggcagacgggataaaaaataaaagcagctccccgagaagccacgctgcaccaagctcgatccattcaagcttgataatgttaaagtgcaataatgtgaaaagaatcacaatccctattatactgccgggaatatttatatgaagaagggctgtcacccaattaatcagccgagcaaatataaataacagagcgatttgaataacggttagcaacagttttttcatattgatgcctcccttatatacttattgtacataaggtctctctataggtaaaatatatattaagaataagaagtattccttttgtctatagaaagggtgaagcgcatggatatccgccatttaacatatttcttggaagtcgcccgtttaaaaagttttacgaaggcttcccaatccctttatgtttctcagccgacgatatcaaaaatgatcaaaaatttagaagaagagctcggaattgaactgttttaccgaaacggcaggcaggtggaactgactgatgccggtcatagcatgtatgtgcaggcgcaggaaatcattaaatcatttcaaaacctgacgtcagaattaaatgatattatggaagtcaagaaagggcacgtacggattggactgccgccgatgatcggatcggggtttttccccagagtgctcggcgatttccgtgaaaactatccgaatgtcacctttcagctagtcgaagacggttctataaaagtccaagaaggtgtcggggacggctctcttgatatcggcgttgtggtccttcccgcaaacgaagatatctttcattcgtttacaatcgtaaaagaaaccttaatgcttgtcgttcacccttcccaccggctggctgatgagaaagaatgtcagctgcgtgagttgaaggacgagccttttattttcttcagagaggattttgtcctgcacaaccgaattatgacggaatgtatcaaggctgggttccggccccatatcatttatgaaacatcacaatgggattttattagtgagatggtatccgccaaccttgggatcgggcttttgccggaacggatctgccgcggccttgacccggaaaaagtgaaagtcattccgcttgtcgatccggtcatcccttggcacctcgccattatttggagaaaggacaggtacttgtcgtttgccgccagagcttggctcgaacatacgaaatcgtatttatgggacccgaaaaaagatagtaaaggatgatgcaaatatggatgcacaatcagcagcaaaatgtcttacggctgtccgccggcatagcccactggtgcatagcataaccaacaatgtcgtaacgaatttcacagcaaacggcctgctcgcgctcggcgcatcgcccgttatggcgtacgcaaaagaagaggtcgccgatatggcgaaaattgcgggtgcactcgttttaaatatcggaacactgagcaaggagtcagtcgaagcgatgatcatcgcgggaaaatcagctaatgaacatggcgttcccgtcattcttgatcctgtcggtgccggagcaacaccgttccgcactgaatcggcacgtgacatcattcgtgaggtgcgccttgctgcaatcagaggaaatgcggcggaaattgcccataccgtcggcgtgaccgattggctgatcaaaggtgttgatgcgggtgaaggtggaggcgacatcatccggctggctcagcaggcggcacaaaagctaaacacggtcattgcgataactggtgaagttgatgtcatagccgacacgtcacatgtatacacccttcataacggccacaagctgctgacaaaagtgacaggcgccggttgcctgctgacttccgtcgtcggtgcgttttgcgctgtggaagaaaatccattgtttgctgctattgcggccatttcttcgtatggggtcgccgctcagcttgccgcacagcagacggctgacaaaggccctggaagctttcagattgaattgctgaacaagctttcaactgttactgaacaagacgtccaagaatgggcgactatagaaagggtgactgtctcatgactcgtatttctcgggaaatgatgaaagagttattatctgtatacttcattatggggtcaaacaatacgaaagccgatcctgttacagttgtacaaaaagcgttaaaaggcggtgccaccctgtaccagttccgtgaaaaaggcggggatgcgctgacaggagaggctcggattaaatttgctgaaaaagcgcaggcagcttgccgtgaagctggtgttccgttcattgtcaatgatgatgtggaattggctctgaatctgaaagctgatggtatccacatcggccaggaagacgcaaatgcgaaagaggtaagagctgccataggtgatatgattctcggcgtttctgcccatacgatgtctgaggtgaagcaagccgaagaagacggagcggattatgtcgggcttgggccgatctatccgactgaaacgaaaaaagatacgagagcggtacagggtgtatctcttatcgaagcagtgcgccgccaaggcatcagcattccaattgtcggcatcggcggaatcacaatagataatgccgcacctgttatccaagcgggggccgatggcgtcagtatgatcagcgccatcagtcaggcggaggatcctgagagtgctgcacgcaagtttcgtgaggaaattcaaacgtataaaacaggaagataatcgttcattttccttcaaagggctgttctgtaaaaggacagcttttttgctgtccatcaaggttttcagaccttcaaattttaattgacaaaggacaggaactggctatgattatgttatacaatgataatcattttcaattataggaggaacatgatggctcgggggctggcacttattctattcagcttgttgatggttttcggttctgcggcacatgcggaagatgatccgatcgccgcattaattcaattaaacaagcaaatgatcaaatccgtaaaagacggggatatggattcggcacaacaaacgtttgacaccttcaaggcgaagtggaaaaaagaagaaccttctattaagaaagaaaacctttcttctcacagtgaaatggacgcgaatatcgcgatgatttctctttcttttatcaatcaagacgcacgtaagctcaaaacacagcttgaagagcttgcgtctcatttagaaacctatcagcaggctgtcgtgctgaaaaagacatcctcaggtcaatcaagggcgtccttaacagcctatatacaaagcttgaaagacacaaaacagttcatagaaaaaaaacaattggatgaagcgtcatccgcaatcgacaatttagttacatcctggctcgctgttgagggagatgtcgtgtcccaatcgaaagaagcctatacgacatcggaggaaaatctggcgctgatgaaggcggagatcggcagccatcctgaaaaggtatcaaagcaaattgacgaaatgattcaattgctcgagccgatcgcttcaagcagctacagctggtgggatgcggcgctgatcccggttcgtgaaggaatggaggccctccttgtcatcggagcgctattaaccatgacaaaaaaagcgcgggttacgcgttcctcgacatggatctggggcggggcgtccgccggcatggctgtttccttagcagccggcatcggtgtcacggttctgttctcctccagtgtattcggagaaaacaatttcttgcttggcggcgttaccggcgtactgtccgctgtcatgcttttgtatgtcggggtgtggctgcacagaaacgcctcaatggataaatggagagaaaaaatcaatatccagaagtcacaggcactaaaaaaacgaagcctgctttcctttgcgctcattgcatttctggcagttgtaagagaaggtctcgaaacggtcatctttttcatcgggcttgtcgggaagctcccgctcactgaactgatcggcggaactgccgcagggcttatcgttctcgtcatcgtcggtgttctgatgatcaagctcggaatgcgcattccattgaagccgttttttcttctatcaatggcggttgtcctgtatatgtgcgtgaaatttctcggaaccggcgttcacagccttcaactggcgggcattcttccgtctgatgcagaaagctggctgccgtctgtatcggtgctaggaatttatccgtctgtgtacagcacgattccgcaaatgttgattttactctttttactgattgcgcttgtttcagaagcggcaaaacattttacaaacggaaaggaactgacaaaatgaatttcacaaaaatcgctgtatcagccggatgcatccttgcgctgtgcgcaggctgcggagccaatgacacatcttcaaccaaagaaaaagcttcatctgaaaaaagcggggtcactaaagaaatcaccgcatccgtaaataaaatggaaaccatcatttctaagctgaatgactcagtggaaaaaggagaccaaaaagagattgaaaagaaggggaaagagttaaacagctactggctttcctttgaaaacgatattcgcagcgactatccattcgaatatacagaaatcgaaaagcatcttcagccaatctacacagaagcgcaaaaagacaaaccggatgcaggaaaaatcaagacagaatccgagtcattgaaagcatccttagaagacctgacagaagcgaagaagagcggcaaaaaggctagcgatcagctggcaaaagcagcggatgagtataaaggctatgtcaaagagcagagtgaccagcttgtcaaagcgactgaagcatttacgggtgctgtgaaatccggcgatatcgaaaagtccaaaacgttatatgcgaaagcgcgtgtttattacgagcgaatcgaaccgatcgctgaaagcctcggagatcttgatccgaaaattgacgcacgagaaaacgatgttgaagaaggagacaaatggacaggcttccataagcttgagaaggccatttggaaggatcaagatatttccggggaaaaggcaacagctgaccagcttctcaaggatgtaaaagagcttgacggttcaattcaatcactgaaattaacacctgaacaaattgttgcaggcgcgatggagcttctgaacgaagccggaatttcgaaaatcacgggagaagaagagcgctactcacgaattgatttagttgaccttatggcaaatgtggaaggctccgaagccgtttatcaaacagtgaaaagcgcgcttgtaaaagatcactccgacttgacggaaaaactggatacggagttcagcgaatttgaagttttaatggcaaaatacaaaacaaatgatcagtcctatacgtcttatgataaattaagtgaaaagcaaatcagagagctgagcactaagctgacgactctttctgaaaccatgtcgaagattgcgaatgtgctataaaaggagttttgtaacatcatgagcgatgaacagaaaaagccagaacaaattcacagacgggacattttaaaatggggagcgatggcgggggcagccgttgcgatcggtgccagcggtctcggcggtctcgctccgcttgttcagactgcggctaagccatcgaaaaaggatgaaaaagaggaggagcagattgttccgttttacggaaagcatcaggccggaatcacaactgcccatcagacgtatgtctattttgctgcactggatgtaacagcaaaagacaaaagcgacatcattacgttatttagaaactggacaagtctcacacagatgctgacgtctggcaagaaaatgtcagcggagcagagaaatcagtatctgccgccgcaggatacaggtgagtctgctgatttatccccttccaacttaacggtcacattcggattcgggcctggcttttttgaaaaagacggaaaggaccgcttcggactgaaaagcaaaaaaccgaagcacctagccgctcttccagcgatgcccaatgacaacctggatgaaaagcagggaggcggggacatctgcattcaagtgtgtgcagacgacgagcaagtggcgtttcacgcgctgcgtaacctgctaaatcaagcggtcggcacttgtgaggtccgttttgtgaacaaaggctttttaagcggtggaaaaaatggtgaaacaccgcgcaacctcttcgggtttaaagatggaacaggcaaccagagcacgaaggatgacacgttgatgaactcgatcgtgtggattcagtctggtgagcctgactggatgacgggcggcacctatatggcttttcggaaaatcaaaatgttccttgaggtatgggaccgctcttccctcaaggaccaagaggataccttcggccgcagaaaaagctcgggggcgccttttgggcagaaaaaggaaacagatcccgtgaagctgaatcaaattccgtctaattcacacgtcagtctagcgaaatctactgggaaacaaattttgcgaagagctttctcttacacagaaggacttgatccgaaaaccggctatatggatgcaggtctcctgtttatcagttttcaaaaaaatcccgacaatcagtttatcccgatgctgaaggctctttcagcaaaggatgcgttaaacgaatatacacaaacaatcggttctgctttatacgcatgcccaggcggctgcaaaaaaggagaatatattgcccagcgtttgctggaatcataaaagaagcctttacaggcttctttcagcgtgtcgacaaaccctcgcattcgttgtcaagcctgtgcgttggtgctcacgaattagagcattcgctccgctccaatgctcggctttcctagacttcaagggttttcaatcacgctgaaaggatgacaaaatcctaaaactttttaggattttgtcatcaatctgaaagaagcctaaatcggcttctttattaaaaaacagttgtaactttaattgttacagtttaaaatcaatttagtatgaaaggagattatcatgacagtacacattaaagtttattcagattacgtctgcccattttgttttgttggaaaagccgcttttgaagaagcgataaaaggaaaggatgttgaagtcgagtggatgccgtttgaactgcgcccaagcccatctcctcagcttgatccggtcaatgatccttctaaacagtacatgtggcagacatcaattcagccaatggcggagaaattaggagtcgagatcaattttccaaacgtctcgccccatccgtatacagacctcgcgtttgaaggcttccattttgcgaaggaatacaataaaggacatgaatacaacacccgtgtctttcaggcatttttccaggaggaccaaaatatcggcgatattgacatcttgacgaagctcgccgaggaagtgggattagacggtgcatcattcaaatcagcactggaaacaagaacatatcaggacgtgcagcgccaagccttgaagcacgcctatgaagaggctgacatcacagccgttccaacctttattatcggtgacactgtaattccgggtgctgccggcaaggatgtatttgaaaaagcgatttctgacgagcagaagaaaaagtaaggaaaaagctctcgataaagagagctttttttattcctgttccatatggacgccagtatgcgccttcacctgaatttctgcaaacgtatcttcatcaattgttttatcagacgacagcaccgttccgagccacgcgccgagaaagccgagcgggatggaaataattcctggattagatagcggaatgagcggatcaccggtaaaaatagcacctccggccgggtcccacacactagggctcatcgataccagcacaagcgcgctgatcaggcctgtcaggctgccccataaagcgcctgaggcattgaatcgtttccagaagactgtaaacacaatcagcggaaggtttgcgctggcggctaccgcaaacgcgagtgcaacaaggaacgccacatttaaggattgtgcaaaaatcgcaaggagaatcgagagcactgacacggcgacagaagcccatctggccgctttcatttgttctttttcagttgcttctccctttctgatgatctggctgtaaatatcatgggcaaatgctgaggcggcagacagcaccaaccctgtcacgacagccaaaatggtggcaaaggcgatggctgatacaaacgcgaacagaaagtctcctccgagcgcttttgctaaaagcggagccgccatatttcccgcttgatcagccgccgtaatcgcgtcaaaaccgacaaatgccgcggcaccaaagccgagaaataccgtcataatgtaaaacacaccgataatccatgtcgctgacacaacggatgtacgggccgtcttggcatccttaacggtataaaaccggatcaatatatgcggaagcccggcggttcccagcacgagtgccaagtttaacgacaaggtctcaagcggcaccttgtatttatttccggggttcaaaaaatcagcgccaagcggagtagccgttttcatctgttcaaacatggtattaaggctaaagccgaatttcgaaaacacgataatcgaaatcacgagtgtgccggccatcagcaaaacagctttaataatttgaacccagcttgtcgcgatcatgccgccaaacacgacataaatggtcatcagcactccgacgatgaggacagccgcggtataatccagccctagaagcagtttgatcagcgcgcccgcccccacgagctgggcgatcatataaaaagtagagatggcaatggtattgagagccgcgacaccgcggattttcttttctttaaagcgagcggcaatcatgtctgccatcgtgtactttccaagattccgaagcggctccgccacgatgtacaagacaacgagataagccaccagaaaaccgatgctgtaaaagaagccatcaaatccatataacgcaatcattccggcaatcccgagaaacgaggcggcagacatgtagtcaccggcaattgccagtccattctgaacgccggtgagcccgccgcccgccgtataaaactcactcgtcgttttcgtccgcttcgcggcaaaatacgtgataataagcgtcaggccaacaatcgccaaaaataataaaaaagcagtcatattcatgtctgttcacccttcagatcctcttttaaagcgcttacatacttatcgaaatgggcggctctccgggaatacacagtactcagtatccaggtcatagcgaattgggcgatggcgaacagccaagcccatgaaacagctccaatggccggtgcattcaaaaaggtgaaataagatgtcaaaacagggagtgaaaaataaaaaacaaaaaagaaaatcgcagaaggaacaataaaagcgcgtttctgctttaaaaaagcttgaaaagacggcgttgcagcaatctgtttataatcagctttgtacatggctttcctccttttattcgctaaacgtaagcaaaaaggtacaccaataggtatgtactgaaagtccgatttatgcgttgtacaatagctggaggatgaaaaaagaaggaagtcgtgaagaggtgaacacagtggtctaaagacaggcgaaggttttcaagctcggccgtgtataaacgagtttgctttcaaaacctcaccgaatgcagcttgttctcagcaaagctgctgtttaccagagcacggttatcatgttcgcatcacctctttatgacaatgcatgtgccaagaggtgatcgcatcaccggctgtctgtcgtagttagctgacacaccgtttgtcctcaagctcagcgcagcgatttgcttttgaatagaggatatggtgaaaactcagatcaggtgatagaaaagccagaggtaaatagatccgcctgttcggactagtcttgccggacggtttttttgtggtttttctttcttgatgctgtctcagattctaaaaactgcctcacatcatgaatgcctaatccaatggatctagcttcttgaattaacatatgccaacctttgtccaaatcttttttaacatgagttttcatagtaacctccaattgtataaaatgttttcctgcaacatgcgggcaataaaagacaagccagcgcgatgatggaggcgagtacaacaaatttcacacatagttgctcggtgttcacaaactgaaggaaaaaccacctacctattccctaaaaaaatgactaatataaccaatggaccttatttataataataaacaattaaatactgactggatagtatgtaaatgaaaataaatcatttagcctattaaaaatgacccctgggaaaccgaatagcataaccgtttaaagaaataaataccgctaaagattgatccggtgtaagataagggtaatcattaccgccaggagaaaaatatgaaaaaaaacaaatttcaaattaaaagagaagcaacatttgaaagttttatagacgctggcgtgaatttgttgattgaccgagcgtatgatccggtttctgtagaagatatcagcagagccgccgggtacagcaaaggagcattttatgttcattttgtcagcaaggacgattttctgctgtaccttctcgaaaaacgtcagatgaaaaaaaagatcattatagggtatcttgatcaaatggagcgggagtcagtgaaatcgctgacattggacgaggctgcaaaacacgctgcagaactgctttattcctattacataaataagccgtcgtgggacatcacctcgtttgccatgaacatgccgacatataaagtcttaaagaaatgcaaggcctatgtccggctgtacgaattgtgggtggaagaaaatgtgttatatattaagtggctgaaggagagaaagctgattgacgcctgtattgatcctgaatatacggctaaaataatatgtgcagtcctcgacggaatcatcaaacaatcatatgtattgggccagccagccaccttccgcagctttttagacgcactctcggtattttttactttagacagagagcacgagaggccaagaattttgaaaagtttttcagaaagcgaggaacatcagtgaagtatagagaaataattatgtatatcattatgggggttttcacaaccattgtgaatatcgccagcttttatatattggtagagatcatgaatgtggattacaaagccgccactgttgccgcttggattttgtccgtgctgtttgcttacataacaaataaattatatgtgtttcagcaaaaaacacatgatctgcagagcctgctgaaagagctcactgcttttttcagcgttcgggtcctgtctctcggcatagatttaggcatgatgatcattcttgtcggccagttcaatacaaatgaaaccttggccaaaatactcgacaacgcggtcattgttgtcgtcaactatgttgcgagcaaatggctcgtctttaaaaaaacaaaagaagaaggggtatgagaggactgcagcatatgatctgccgttttctatgaagaaataaggggaataaaaaataaaaaccagaaaggtgattgcacatgcgggaagagctaaaggggatatttgcaagtgtattcggagaaaaagaggggttacggttttttttcgcacctggaagagtgaatctgattggagaacatacagactataacggcgggcatgtctttccgtgcgcgctgacaatgggtacatatgctgctgttgcagaaagaaacgacgggcttgtccggatgtattcagataactttagaaacgcaggcatcaaggaatgcagccttgacgacattcgctatcaaaaagaagacgactgggcgaactacccaaaaggcgtgatttatgaatttcaacagaggggatatgcagttccccatggctttgacattgtattttcagggaatattccaaacggggcgggactgtcgtcttccgcttctattgaactgctgatgggggtcgtgctccaaagttattttcatcctgaagtagatgcgcttgagcttgtgaaaatggcgcagcatgcggaaaaccattttatcggcgtcaattgcggaattatggaccaatttgcaattggaatggggaaaaaacatcatgcgatgctgctgaactgtgacacgcttgactatgaatatagcaaactcaatgtctcaggcctcgcgctggtcatcgcgaacacgaacaaaaaaaggacattggctgactccagctataatacgagacgccaagaatgcaatgatgcattgcttgatctgaaaaaaggcctcgatattgccgcactgggcgacatcaagccttctgatttcgatgcgcattccagcctgatccaaaatgaaacgaacagacgccgggcaaagcacgctgtatacgaaaatcatcgtgctattaagacggcccatatgttcaaagagaacaatatagatgaaatcgggcagttaatgaaggaatcccacctttcattgaaggatgactatgaagtaacatgccctgaacttgatgagcttgtgtttgcggcatgggatcacgaaggtgtaattggatcaagaatgacgggagcaggctttggcggctgcaccatcagcattgtaaaagatgagttcgttgatgattttattcagaaggttggagacagatatcaagaaaaaacagggctccgagcggacttttatgtcgcggatatcggagagggagcgagagaactaaagggggagtgacatatgagtattattgaacatctggaacagctgcttgagtatggcctggaacgaaaattgatttcgatctgggatcgggaatatacgagaaaccgtctttatgaagcgctgggcatcacacatcccgagccgaactccagcaccagcatcaagcagtcacaaagcctgccggacttgctagctcccatctataaatgggctgccgaaaccggccgaatggaagcggatacagatacgtaccgtgacctgctcagcgcaaagctgatgggctgttttgtgcctgccccgtccgaggtcattcgcaaatttgaagagacaaaagcattatacggcccaaaacaggcgacaaaggaattctatcaatattcagaggatgtctattatatacggactgacagaatcgccaaaaatgttcattggacggtgccgaccgaatatggcgagctggaaatgaccattaacctatcaaagcctgaaaaggacccgaaagcgattgcggctgcaaaagagcaggaacagacaaattatccgatgtgtttgctgtgtaaagaaaatgtcggcttcgagggaagcgtgaatcatccagcccggcaaaatcacagaatcattccggtcatccttgaggacgaacaatggttcctgcaattctcgccatatgtctattatccggagcactgcattgtcttaaaaggtgaacatgaaccgatggagatcagcaaaaaaacatttgaaaggctgctgtcatttcttggccaatatccgcattattttatcggttcaaacgcggatctgccgattgtcggcggcagcatcctaagccatgatcatttccaaggcggcgcgcatgattttccaatggcacgtgcagaagcggaagacgtttatgaattaaatgattatcccggcgtgtcgctgggcttagtgaagtggccgatgtctgtgctcaggctccaaggagacgaaccgggtcatgtcgccgaagctgctgaccatatcttccgcacgtggcagacgtattccgatgaaaaagccggcattgccgcctatacaggcgatacgccccataatacggtcacaccgattgcgcggcgcaggggagacttgtacgaactcgatatcgtactgaggaacaaccggacggatgaggagcatccattaggaatatttcatcctcatcaagaagtccaccatattaaaaaagaaaatatcggcctgattgaggtcatgggattggcgatattgcctggccgcttacaggaggaaatgaaagaaacggcagcggcgctatgttctgctgatccgaaaacagccttagaacaaaatccgctcactgcaaagcatagtgagtgggctcttcggacgatggaaaaaagaaccataacaaaagagaacgtagatctagtcataaaagaagagctgggacatgtattcgcgcgcatccttgaacacgccggtgtatttaagcagacagcagagggaaaacaggccttcagaaggttcatcgatcagttgggcgccaaaccagtcaaaagcctcaaccgctagggttgaggctttttcgatttttatggcaaaacaaacacccaaagcgctgacgcttcgggtgctgctgcttttatcctctttttctggttaacaggcttactagaaagacaacaatggctgcgccgattaccgctggaataatggcaaatccggctaggtgcggcccccatgttccaagcagcccgtgtccgatccaggcgcctataagacctgcgatcatagacccgataattcctccgggcatatctccttttacaaacaggcttccaagccatccgataataatagcgacgataagtgaaataagaaaactcatcatgcaacacatcctattttttatttatttgcttatatcattcctcttttttgtataagataaacaactggatgctctcataaaaaaatacggacaattcagagcatattggctcttcattgcgccttttctttcaatatttgatgcgttaaaatggtaaccgtgtgaaaagatgctagacgaggaaaaaataattcctatctagaaagtttaacaaaatgaaatttttgattgacctaagttttttattgtggtaaaccttaatttgtcagaattagttcttcatcatctttctttactttatatgcggaaataactagaaacttttcatcttaagcgatagatgtgaataaagttggagcaatttttgtcgattttatgacatttaagcgaaaatgggatgaagtttataaaaaaataaagctaataagtgaagtttttgatagcataacaaagtagagaaaagattttgaggaagtatgcacttcagatttattacatcaataggaaggatggtgatcttcttgttcagagcattaaaaccgttgcttgtattagcgctgttaactgtggttttcgtccttgggggatgcagcaatgcttcagtactagatccgaaaggacctgtagctgaacagcaaagtgatttaatcctgttatctatcggatttatgctgtttatcgtcggggtcgtctttgttctatttaccattattttagtaaaataccgcgaccgtaaaggcaaagataatggatcttataacccagaaattcacggtaacacgtttttagaagtagtctggacagtgatcccaattttaatcgtcattgcactttctgtgccaacagtacagacgatatattcgttagaaaaagctcctgaagcaacaaaagacaaagagcctcttgttgtttatgctacttcggtagactggaaatgggtatttagctaccctgaacaggatattgaaacggtcaactacttaaacattcctgtcgaccgcccgatcttgttcaaaatctcatctgcagattcaatggcttcgctatggattcctcagcttggagggcaaaaatatgcgatggcaggaatgctgatggatcaatacttacaggctgacaaagtgggtacttacgaaggccgcaacgcgaacttcacaggtgaacattttgcagaccaagagtttgatgtgaatgcagtcacagaaaaagactttaacagctgggtgaaaaagactcagaacgaggctcctaagctgacaaaagagaagtatgatgaattgatgcttcctgaaaatgtggacgaattaacgttctcttctactcacttgaaatacgttgatcacggacaagacgctgagtacgcgatggaggcgcgcaaacgccttggctatcaagccgtttcaccgcattctaaaacagatccgtttgaaaacgtaaagaaaaacgaatttaagaagtctgatgatacagaagaatgatattgatcaggaaaggaggaagcctgcatgaaattcaaatgggacgaatttttcgtaactggtgacccattaattctgggcgcacaagtttccattgcgctttcaaccattgccattatttttgttctgacttacttcaaaaagtggaaatggctgtggtctgaatggataactactgttgaccataaaaaactcggaatcatgtatattatatctgctgtaattatgttattccgtggcggtgtcgacggtctgatgatgcgtgcccagctagcgcttccgaataacagttttttagactcaaaccactataatgaaatttttacaactcacggtacaatcatgatcatcttcatggcgatgccgttcttaatcggtcttatcaacgttgttgtgcctcttcaaatcggtgcccgcgacgttgcgttcccttacttgaacaacctgagcttctggacgttctttgtaggggcgatgcttttcaatatttctttcgttatcggaggttctccgaacgcaggctggacgagttatatgccgcttgcaagtaacgacatgagccctgggccgggtgagaactactacctcctcggacttcagattgccggtatcggtaccctgatgacagggatcaactttatggtaacaatcttaaaaatgagaacaaaaggcatgacattaatgcgtatgccgatgttcacatggacaacactgatcacaatggttattatcgtgtttgcgttccctgtacttacagtagcattagcacttttatcatttgatcgtttgttcggcgctcactttttcacattggaagcaggcggtatgccgatgctttgggctaacttgttctggatttggggacatcctgaagtatatatcgttattcttccggcgtttggtattttctcagaaatcatctcaagctttgcaagaaaacaattgtttggttacaaagcgatggttggttctattatcgccatctctgtattgagtttcttagtttggactcaccacttcttcacaatggggaacagtgcgtccgttaactcattcttctcaattacgacaatggcaatctcaatcccaaccggggttaaaatctttaactggctctttacaatgtataaaggccgaatcagctttacaacacctatgctgtgggcgcttgcgttcattcctaacttcgttatcggcggggttacaggggttatgcttgcgatggcagcagcggattatcaataccataatacgtacttccttgtatctcacttccactatgtgctgattgcgggtactgtatttgcttgtttcgccggatttattttctggtatccaaaaatgttcggccacaagctgaacgaaagaatcggaaaatggttcttctggatctttatgatcgggttcaatatttgtttcttcccgcaatatttcttggggcttcaaggcatgccgcgccgtatttacacatacggaccgaatgacggctggacaacattgaactttatctcaacagtcggagctttcatgatgggtgtaggattcttaatcctttgctataacatctactacagcttccgttactctactcgtgaaatcagcggagattcatggggtgtgggacgtacgcttgattgggcgacttcttctgcgattccgccgcattacaactttgcggtgcttcctgaagtcaaatctcaagatgcattcctgcatatgaaagaagaaaaaactgaattataccctgaaagcaaattcaagaaaatccatatgccaagcaactcaggcagaccgttctttatgtctgttgccttcggtctcgcaggctttggacttgtctttgaatggtactggatgggcgtagtcggattgatcggagtcctgctctgcatggttctgcgttcattcgaatacgacaacggctactacattagtgttgatgaaataaaagagacggaaagaaagatttccgaataaggaggcgtgagttatggaacatgcagaacacggcaattctaacgcgcctatggaatatcaatctgaaaccggcagacttaatattctcgggttttggatctttttaggggcagaaattgtgttgttctcaacactatttgcaaccttcttcgttcttaaaaacagaacagctggaggtgtcttgccagacgaactatttgaagtcaatctggtaatgattatgacgttcttgctgctgatcagcagctttacctgcgggatcgctgttcatgaaatgcgccgcggaagtttaaaaggcgtagtcatttggacaattatcactcttcttctcggtgccggcttcgtcggatgcgagatcaacgagtttgttcactatgtacatgaaggagcggctctcagtacaagtgcgttctggtctggattctttgttttacttggaactcacggaactcacgtaacaatcgggattttctggatcacaggaattctgattcagttgaagaaacgcggcttaactccgcaaacttcatctaaaatctttatctcaagcttgtactggcacttcttagatgttgtatggattttcatctttacaggtgtctatctcatgggattggggggtctgtaaaatggcaaacaaatctgctgaacacagtcactttccatggaaacacattgtaggttttatcctgtctatcgttttgaccctgctggctctatgggttgcagtgtatactgacctgagctcatcagcaaaactttggattatcttcggcttcgccttcattcaggcggcgctgcagcttctcatgttcatgcatatgacagagagcgaaaacggcacgatccaagtcggaaacacgctgttcggattctttggcgcgatcgttatcgtacttggatccatctggattttcgcggctcactatcaccatggtgaccatatggacggaaatcctcctggaggcgctgaacactcagagcattcaggccataacgaataatacaaaaaaccctcttcagtggaagagggttttttgctgtcttcagctgcttcgctttctgcgaagatacggaaggccgtaaatgataaatgcggcgatatgagcgacaatgacgttaacggcaaacaagataatcatgagagtgtgtccaagtggagaaaggctttctgttgcgtaaaagaagaagaatacccacattaaaatgattggcggaatagctgagagtgcgacttttttgttatcaagccaaataaagagaggcgttgcgctggcaaccaataagtaagcaaaaaacatgtccatcatacccgtctcctttcattttgtgataacgtttacaaaaatgaaatagaggaactgagttgtgtctgttttgtgattgttttttgaacattctgttacaattattataccatgttttccagaaattgatacgtgtttttgcagaaatggactggatctatcgtcttattttttcgtttaatgtgctaggagaatgtatgggcatggggctctgaatttttagctatttctatatgaggtatcacattatttgggaacataacacattatcgcattcgttttttaacaaattctattggtatggcgtttttttcatttgaaaagttttgtgtcaatcgaaacatttcggtttatgatacgtcatatttcgtgtagctgaaaaagcgccgcaaatgctgaaaaaacataaaaggaagcgagcttcacgtgtcatcttgaacgtggttcatgtataataaacattagtgattttccgatgaaaatgtaaggcgggatagaatgagtcgatataagaaacagcaaagccccttttaccagggggatttgatttttatatttggtgtgttttttattataagcgtagtatcaatatatgctgccggtcagtttgggcagtatgggaacacggattggattcagcaaattgtgttttatcttttgggggctgtagccattacagttcttttgtactttgatttagaacagcttgaaaagttaagtttatatatttttatcattggtattttatctttgattattcttaaaatcagtcccgagtctattgcacctgttattaaaggggcaaaaagttggtttaggatcggtagaataacaatacagccgtcagagtttatgaaggttggtttgattatgatgcttgcttcagttattggaaaagcaaatcctaaaggagttcggacgcttagggatgatatccacttgttattaaagattgcgggtgtcgcagttattcctgtaggtcttatcctgatgcaggatgctgggactgcgggaatatgtatgtttatcgttcttgtaatggtttttatgtcagggataaattggaaattgattgcgatcatagctggttcaggtatcttactcatttcattaattttattagtaatgataaactttcctgacgttgctaaatcagttggaatacaggattatcaaattaagcgggtcacttcttgggtgtctgcttcaaatgagacacaggaagattcaaatgacagctggcaagttgaccaggccatcatggcaataggatctggtggtattttaggtaatggtatttctaatttgaaggtttatgttccagagagtacgactgactttatcttttctataataggtgagtcatttggctttataggctgtgcaattgttgtcatcatgttcttctttttaatctacaggcttgttgttctgatagacaaaatacatccgtttaaccgtttcgcttctttcttttgcgttggctatacggcgttaattgtgatccacacattccagaatatcggaatgaacattggcattatgcctgttaccgggattccgctgctgtttgtcagctatgggggaagctcgacactttccacgttaatcggatttgggattgtatataatgcaagtgtgcagctgacgaaatacagaagttatctttttaattcttgatatgcagacagcctttacagaggctgtctttttttgtgcagagcatttcacttttgagatcactttttttcggatatgataaaaagtgataaggaggtttttgtgatgaataacacaatcgaaaccattttgaatcatcggtcaatccggtcttttactgatcagcttttgacagctgaagaaattgatacattagtgaaaagtgcgcaggctgcgtctacatccagctatgtgcaggcatattcgattatcggggtttctgatcctgagaaaaaacgtgagctgtccgtgcttgctgggaatcagccttacgttgagaagaacggacacttttttgtattttgtgcggatttgtaccgccatcaacaactggctgaggaaaaaggtgaacatatttctgagctgctcgagaatacagaaatgtttatggttagcttgattgatgcggcgctggcagcgcaaaatatgagcattgccgctgaatccatggggcttggcatttgctatatcggcggcattcggaatgaattggacaaggtgacagaggtgctgcaaacgcctgaccatgtgctcccgcttttcggactggcagtaggccatcctgcgaacctttccggcaaaaaaccgagattgccaaagcaggccgtttatcatgaaaatacgtataatgtgaacacagacgatttccgtcatactatgaatacgtatgacaaaaccatttctgattactatagagaaagaacaaacgggaagcgggaagaaacgtggtccgatcaaatactgaactttatgaagcaaaagccgcgtacgtatttaaatgactacgtgaaagaaaagggctttaataaaaactaaagcaaacctctccgtctggaggggtttttatgtttcacgtgtaacatattccgacaaatagggacatgctttcacaaataaatggcgaatgataggggacactgataagcagtgtgagcggctttggagaaaaaataggggatcagtgatacgatgaggatgaggtggtagggatggtttcattaagtatattagatcaatctccagtatcagagggcagcaatgcagaaacggccttacagcaaaccgttgcgcttgcccaagctgctgaggaccttggatataagagattttgggtttctgagcatcacttttcaaaacggctggcagggtccagtcctgaggtgctaatcagtcatatagcagcgaaaacaaagcgaattcgtgttggatcaggaggagtcatgctgccgcattacagtgcttataaagtagctgaaaactttcgtgttctggaggggctgacaccaggaagaattgacctggggcttggcagagcaccggggggaatgccgattgcatcatgggcgctgaatgacggtggtaagcgcaatgctgatcagtatccgcagcaaattaaggagctgaccatgtatttgcatgatttggcggatgacaaacaccgttttccgaatctgaccgctgcgccgcatatttcaacggctccggatgtgtggctgctcggctcatctggagaaagcgcgctgctcgcagctgaatctggcgctggctatatgtttgcccattttatcaatggagagggcggagagggtactgtcagacagtataagaggcgattcaaaccgtctgtgttaggagatacgcctcgagcggcagttgctgtttttgttctttgtgctgacacggaggagaaggcagaggagcttggggctgtgcttgattttacacttttggcgggagagcagggtattcctttagagggagttccttcgtatgaagctgttcggaaaaatacgtattctccttatgaacagagacgaattgctgataatcgaaatcgaatgattgttggtacgaaagaacaggttaaggagcggctgttagctttgagtaacgcgtatgaaacagaggaaatcatggtggtgaccatcacgcatcattttgaagataagctccgatcgtatcgcttattgcaggaggcgtttgctgactgatctttaaaaagccctgccgaatcggcagggctttttcttattcaacagtgaaaggttcttcggtcaaaacctggcttgacttgcctttgttcgcggcatatgcgagcaagtaatactctccggccggaagtttggttccgccattaatcgtgccgtcccagtcaaagtactggtaacctttatcttggtttttataaatgccggcttggcctgcgaaatcaaggttgctgtcatagacgaggaacgccagctcttccgctcccgcaggaaggtaggtttcaatttgataggtaccttgtacagacccttcgctgacagagacagatgtgactctcggataatcgggctctttcacaatcagcaatgtaggtaccttagcgaccgtttttccgccttctctgacgataaccgttccttcataggtgccagcttttgttttcttcgtattgacctttacttttgcagtggctttcccggtttgatgtgccggaatcacaacacggcttgtgccggatgtggaaatgccgctgccattaaatgagtattcaagtgtgtatgactttctaatggaagattgattttcaatcgtaaacgtttcattttttgtttcgtttccgttttccttcaagaacgtgccgtatgaatagcttccaggtgagacgagcgaatcggctttgattgcgttcataattcttgcgctgcctgcgccttgagcgttatgcggatatacttccccatcgctatcctttaaagtgacagcggtattcatgatggcggctttaatctgttcaacgctccactttggtttggcttgtttaataacggcaaccgctccggcaatatgaggcgatgccatgcttgttccttgttttgatccgtagccgtatggatggtcaggatcgtgtgttgggatcgtgctcacgatattgacccctggcgcggaaatatcaggcttaatcatccacgtatccataacagggccgcgtgatgagaaatcagcgacttgttcaccgagcgcttttgagaccgtcaacttgaatgttgtttttgtctcaccagctttcagggcgctgacgagtttttcgccgtcttctaatgaaagcttaatcgttgggacagacatgcctggcacattggcttcaatttctccagagaggttgttatacacaaccatgccgattgcaccggcttttttagcgttatccgctttatccacaaatgcaatgctgcctcgtttgacaacggcgactttgcctgtcaggtctttcccttcaaaatcctttgcttcgccgattcccgcttcgacaagctcaacttctttgttattgagcgctttgacgtcgtcctctttgttgtagcccatcacttttgctgaagagtaggagccgaaagtgacggcgtattcattgagcggcagctgagtcgcaccgacagaaatcgcttctcttgatgtgcccggcgatccgactgtccagccgttcggtccgctgttgccgtttgaggtaacagcgacaacgccttctgacatggcccagtcaagcgctgtgcttgtcgcccagtccgggttgtttaaagagtttccgagagacaggttcatcacatctgccccgtcctgcactgcacgttccacgcccgcgatgacgttttccgttgtgccgcttccgccaggccctaacacacgataagcaagaagtgtggcatcaggcgctacgcctttaatcgttccgtttgcagccacagttccggctacgtgtgtgccatggtcagttgcctcgcccctcggatcgccggttggtgtttcttttggatcgtaatcattgtccacaaaatcgtatcctttatattgtccaaagtttttcttcagatctgggtgattgtattcaaccccagtgtcaataatcgccaccttgatgccttttcctgtgtagcctaaatcccatgcatcgtttgctccgatataaggcgcactgtcatccatttgcggagatacggcgtcttcggagattgtgacgtctttatccttcatattgtctgttttatatgtgacgttcgggtacactgccttaacgtcttttaccgctagaagttttggaatctcattagctggaagcttcatagagaagcctgagaatacctgctcatattcccggtttacttttccgtttttcactgctttgattgctttgttttttgctttggtgcgagcggttttcagcttgcttttcgattggctttctcccgcttccttcgcttctgccaaggatttttcttttaattccactataacggttgtttttttgcttgtcgtcatatcgatatcaccgaatacctcggctttttccagatcagccgacgtttttgaagaagccggagctgcctgaacgcccgtaatgcctgtggataacgcaaaaaataagacgaaacttacaagcagaaagcgaatgatcccctttttcaatgtgtttccccctttgtatttagaaaaaatgtgaaagatctagtatatatttcttgaaaattcaaaaaaatccttgtgtcatttggaccatttattggattttgtttgtgtataacgaaggagttatacacagaaccctgtgtataagtgaataaacctgtgtatatatatagttaggaatatacgttcgtatacaaaatatagatagagtttgtggacatgtggatatctcttgtgattaagttgttcttatctttgggataacttgtgtataaagttttcaaagcggttctccaattttcatttcaattctttcagctttcaacaaaacttctaaaaactagttggttttttcactcatattgtgacaaagaattctctttccacggtctatcatagagtcatgagttttgctagagccgctagtttgcgagaaaagaaatcggccgtcttttcttgcgggctgcggctgagaaaacgggctgctaaaaaggctgcctgccaaaaagaagcggagggatgtttttctatgaaacgtttgcttgtatctttacgggtgtggatggtctttttgatgaactgggtgacgccggacagaaaaactgcggctgccgcggtctattcggctcagcgtacataccaaagaaaggcggctgtgcaggccgcaggactcgtttcgttttatgaatggcggatggctgtgaatgaggaagaaaagcagaaagcgaaagccgccgcgctttataaaagaagatgtttgcaagccttcaaggaatcgccaaagcaggagagagcgggcccgcatctttacatggcggtcaaaaggaggtaaaatcccagtcaaaagcaaattggcgggagagataacctcttgaaaatctataaagtattaaacaacaatgcggctttaataaaagaggatgatcaggaaaaaatcgtgatgggaccgggaatcgcttttcaaaaaaagaaaaatgatctcatccctatgaataaagtggaaaagatctttgtcgtgcgcgacgagaatgaaaagttcaaacaaatcctgcaaacactgccggaggagcatatagaaatagctgaggatatcatcagctatgcggaaggagagctcgcggcgccgctgagcgatcacattcatatcgcgctttccgaccatttgtcctttgcgatcgaaaggattcaaaatgggctgcttgtgcagaataaattgctgcatgagataaaggcgctctataaaaaagaatatgagatcggcctgtgggcgatcggacatgtaaaagagacattgggcgtgtctctgcctgaagatgaagcgggttatattgcccttcacatccatacggcgaagatggatgcggagagcatgtattcagcgctgaagcatacgaccatgatcaaagaaatgatagagaaaataaaacaatactttaatcgaaaggtggatgaaaacagcatttcctatcaacgccttgtcacgcatttgcgatacgcggtcagccggttggaatcaaatgaagcgctccatcgtatggacgaggagatgctttatttcatccaaaaaaagtattcattcgcctatcaatgtgcgctggagctggcggagtttttgaaaaatgaatatcaattacatttgccggaatccgaggccggctatatcacgctgcatgtccagcgtcttcaagatctctcggaataaccgctttgacttgcagggagtgatctctggaagtttttttattgatcaggattcagtgtgtagtacatccagcccatcataactattcccgcggtcagattgccgagcgtaacggggattaagtttctgactgctcccatcagtgtcactgtatcagggtgctcgatcaaaagcgagatggcgaatgtgcacatattggcaatgctgtgttcaaagccggaaataaagaagcagaaaacgaaaagcatcatggtaaaaagctttgctccttcccctttgagagacattggaatgaaaaaggcgaggcacacaagccaattgcacagcattcctctgaaaaacaattcggaagccggcggctccattttgtgctctgccaaatgaatcaaaaaggaatgaacagaaggctcctcaaaaagtcccgtcgcgctgatcaggatggcaaacagaatggcgccgattaaattgccggcatagcttgacatccacaagtatagggtgtcgcgccagctgatttttttccggagcgcggtataggtgaaataaaaggtgttgccggtaaataaatctccgcctccgtaagcaatcatcagaatagcggccccgaaagtgacagcggctgccggaaaggcaaacggagaatcagccataaagaaatagctgcctgttttgcttgcggctgtaatgccaaaaccaataaatatactggccaaaatggaccgaagcacataacggattttgcttgaagcgaatatgttttgttttttcaaagcatactgttcaaccttttgtaatgcttgagtttccattgtcttttcctgctttctttcatgattgagcatagtatagcacgatattgtgaagtatttcacaattaatttttacgaatttttgtctacatgttatatcaaactatttaactaaaaaaatagttgacgaaaacgctatcatgatttatgatgaaagcgtattcttaatctgaataagcgggattgtgactggtaaagcaggcaagacctaaaatttgcgtaaatgaaaaaggatcgctgtgtcctttattcgttggcgaattttaggtcttttttgtttaaataaaagggggagaaatagatggattacaaagagactgcaaaacgcctcattgagcttctcggagggaaagaaaatattatcagcgcggctcattgtgcaacaagactgcgtttagtgatgaaagatgaatcaaagatagatcaagcacaagtagaagagcttgatggcgttaaaggggctttcagcagctctggccagtaccagatcattttcggaacaggccttgtgaataaagtattcgatgccttttctaaagaagctgatatcgagcgtgaagaacacgtcaatcatcaggatgcggcaaaagaaaagctgaatcccgctgcgagatttgcgaaaacgctttctaatatttttgttccaatcatcccagctattgtagccagcggcctattaatgggattgctgggtatgatcaatgcgtttcattggatgagcaaggattctgcgcttttgcagctgcttgatatgttttcaagtgcagcattcattttcttgccgattctaatcggggtcagcgcttcaaaagagtttggcagcaatccatacttgggagcggtcatcgggggaatcatgattcatccgaatcttttaaatccatggggattggcggaagcgacacctgattacatgcatcttttcggatttgatatcgctcttctcggctaccagggaactgttatccctgtcctgcttgcggtgtatgtgatgagcaaggtagagaaatggacgagaaaagtggttccacatgcggtggatttgcttgttacaccatttgttactgtgattgtcaccgggtttgttgcttttatcgcgattggccctctaggcagagcgcttggctccggcattacggttgctttaacttatgtatatgaccatgccggttttgtcgcaggtctgattttcgggggcacgtattcactcatcgtgctgacaggcgttcatcacagcttccatgcgattgaggcagggctaattgcagatataggcaaaaactacttgctgccgatctggtcaatggcgaatgtcgcacagggcggggcaggtcttgccgtcttctttatggcgaaaaaggcaaagacaaaagaaatcgcgcttccggcagcattttccgcttttctcggcattactgagcccgtcatattcggagtcaatctgcgctaccgaaaaccgtttatcgccgcgatgatcggaggcgcattgggtggggcatatgtcgtctttacacatgtagctgcaaacgcttacgggttaacgggaattccgatgatcgccattgcggctccgtttggcttcagcaacttgattcactatctgattggcatggcgattgcggcagtgtcagcgttcattgcagcatttgtcatgaagattaatgaggatgaggagaggaaaaaatgacagcacatgaccaggagcttcgtcgccgggcttatgaagaagtggagaaaaaagagcccatcgctaacagcgatccgcaccgccagcattttcatatcatgccgccggttgggctgctgaatgacccgaatggcgtgatttattggaagggcagctatcatgtattctttcagtggcagccgtttcagacggggcacggcgcaaaattttgggggcattatacgacacaggatgttgtgaattggaagcgggaagagattgcgctggctccgagtgattggtttgataaaaacggctgctactcgggcagcgctgtcacgaaagacgatcggctctatcttttttacacaggaaatgtcagggatcaggatggaaatcgggaaacgtatcaatgccttgctgtttctgacgacgggctgtcctttgagaaaaagggtgtcgtcgcccgccttccggaaggatatacggcgcattttcgcgatccgaaggtatgggagcatgaaggcacatggtatatggtgattggtgcgcaaacagagaatttgaaagggcaggctgtgttgtttgcttctgataacctgacagagtggagatttcttggcccgataaccggcgcgggcttcaacgggctggacgattttggatacatgtgggaatgccctgatttgttttcccttcaaggatcggatgtgctgattgtttcgcctcaagggcttgaggctgacggtttccgttatcagaacgtatatcaatcaggttattttgtcggccgcctcgattataacaagcctgaactgaagcatggtgaatttacggagcttgatcaaggttttgatttttacgcgccgcaaacacttgaagacgatcagggaaggcggattttatttgcatggatggcggtgcctgatcaggatgaagggtcccatccgaccattgactgccactggattcactgcatgacgctgccgagacagctgacgctttcaggacagaagctgattcagcagccgctgcctgagctaaaagccatgcgcagaaatgagaaaaaaatacacatcaacatgcatggatcatctggtgcgcttccagtggaaaaacctgaaagaactgagattctactggaagacattcatacggagtctggcttttcaatcagtatccgcggaacggctacgttttccttccataaagacgaggggattgttacgctggaacgaaagagctttgacggaaaaagaacagaagcgagacattgccgcatcaaggatttgcataccgtacacatgtttctcgacgcgtcatctgtggaaatctttatcaataacggagaagaggtctttagtgcaagatattttcctttcccgggaaatcatgaagtaacagccagtgcgaccgggaaatctgaaatgaatgtcggaatttggacacttatgtagaaaatccttctattttcttatgtgaaatctgagccatctgtgctattcttcaacgataacctactatttttttctgtaaaaggagttgttttcttgaatatacatgaacagaagataacaccggaatgtttggaaaaggctgctaaccaagttgaagataagcgagaagaatataaggatgtgctgcttcagctgaaaaaaatgcttggcggaacaacgccgcacagtgaaacggcggaaattctcacgcgggcatatgaacaaatgaaggaatatgcactttttgttcagtcgatagaaacatttttgaggaaatctgcaaacaatttaaaaatcaaataaacaggctgccgatgggatcggcagttttttctgtgaaaagtcttcggtgatttaaaaagggctgcctctctgtaaggcagcccctttttttatgattgttgattcaggcgcagtgcagaatgcttcgtaggaccaacatactggtttagcgggaaggattctttaatggccgctgtgatgaattctttcgctgcgtaaatggcttctttgacttccgcacctttggcaagctccgctgtcacggctgctgagaatgtacagcctgcgccatgtgtataaggcgtatcgatcatttcgctttcaaggacttccgctgtttctccgtcatagagaacatcaacggctttctcgtgtttgagtttgcctccgcctgtaatgacgacatattgagcgccgagtgcgtgaatttttttcgcggcttcgatcatatcgtcaactgtttttagttcatccatgccgctgagctggctggcttcaaacaagtttggcgtaatgacagtggctagcggagccaattgctcacgcagggcttgggcgtgctccggataaaggacttcattagcacctttgcaaaccataaccgggtcaattaccacattttttaattgtttttctttgatcgtttttgccgcaagctcgataatgtcaacggttggcagcattcctgttttcatggcgtccacgccgatgccgtccgtaattgttgcaagctgggcgcggattgtatcagtatcgatcgggaatacctgatggttccagctgttgtttgggtccatcgcaacgatcaccgttaaggcggtcatcccgtatacgtttttttcttgaaatgtttttaaatcagcttgaatcccagcaccgccgctggaatctgagccggcaatggtgagtgctttatgcatagacatgtcttgaacctccatcatgttttgtctttcattatagttagattttctctgtatcacaatatagaagatctataggaatcatttgacaatctcaacgggctttcgtaaaatgctacataagaaaactaggtaggggttttgagatgttaaatcgtgagctggttaagggaagcacggttatattggtattgacgcttctgaacgagcggccgatgtacggctatgagcttgtaaaagaaatgggaagccgcagcggaaatgaactgcagatgaaagaagggaccttgtatccttctcttcacaagcttgaacgccaagggtatatttcttcctactgggagaagcaggagaaaggaccggaccgcaaatattaccggattacagacgagggcaaagaagtgctggcggaacgcacgaaggaatggagcgtattttcagccatgatggaccgaatactgaagtggagcggacaaaatggataaagaaacatatgtatccgaaatcaaaagcgggcttaaagggcttcctgagggtgaggcgatgatagaagagattgagagccatattgaacatcatctgtttcgctcttttcaggaaggaaagagtgaggaggaagctatgcagactttattgcaggcgtttggaacaccaactgacattgtttcttcgtttaagaaaatacagccagtaacgtttcgtgcgtttttgatgttccatcttttctgtaacagtgccctattcgctgtcggcattgcgattacaataatgcatgtatggcttgaatcaccgtttgttcaagcagtatggaaaggcatttctgtttctgtttggctgatcttagctgcatatatgatctactgggtgctgattgggtatcaaggcgtgaaggagtttggaaaacgcggagaaaagcttgttctacatacgattctgatctcaatggtgccaaacgtcatttttatgcttgtttttctattcaatgtaattcctgctgcgctgtttcaatccttgttgacaccttggtttgttggaacttgtgcttttgcaacgctgttatttccgttatttggccgaatgggctgttatattggcaggcgtcagcttgtctgattttttaggtatatacatagaatttctatgtaaaggaggtgtatgtcgtgaggattagctcttgtttatatggttttgtagctcatggggcagtatttttgtttactggtggctgcatgctcttggctatggcagccagcttgccttttgtttttctgcttgatcggctgcctgatgtcgtctttacagcaggtgccattcttacgctgctatgttcatatgcttatgtctggttttgggcggtccgatttgcatataaccagaaaatgcgcctgtttgaggttcaattggggtcctttgtgttgctagccctcatgatatctttgtttttattggatggatctagtatgaaagacatcatgatgaattgggacgatgcaggctgtgcttttgtgccgccggcttttacatttttgtgtctttcttatgcactggtgctgctgccggtctatcaatctaagctgtggcgtcttatccttccgaatggcgtccgcatgaaagatatctttcatgtctttggagatctgatgctgatcatggtgcttctgatcggagccactttgctgtttctatcattgtagtatgccgtttcagtaggatattcccactgatctcccgtccaatatatgttttaatagtacatgactatgaaaatgagaaggagagcatcatgaagatttctatcgtaattgtgacctataatcggattccggctttgtgtgagcttttggagtcgatttcccgccagaccttgatgccgtatgaaattattattgtgaatgatgccggggaatcggtcgtgccggtcaaagcactttatccggagctgccgattgctgtcatcaatttagaaaagaactcggggcatgtggctgcgagaaatgccggtgtaaaagaggcgtctggggattgcattatgctgtgtgatgacgatgatttctttacgccagggcatatcgagaaaatggcaaaggaaatagaaacggcagacttcgttcattctgatgcggaaatagtttcgtttgaagagaaaaacggaacaaggtatccagtgtcacggaaattgtttgcttataccgctgactatgaggatatgagagtgttttctacatacgtgccgtcgggcagcatgtacagacgttttctgcatgatgaaatcgggtatttcgatgctgatgtgcacaattactgggactgggatttttatttgcgcgcggccaaggattaccgggtgaagcgtgtcccttgcgccagcgtgatttatgccttcagtgacgcgggagacaatcagtctgctgaccttggcgccaagcggaagcaatatttggatcgtttaagtgaaaagcacggactcggggagctgccgacgaaaaactttgccgtcctgcttgaagagcctgagatgaagaggcgggaagcaaaaagtgaaatggtttgggatggcgagcctgtctattccagacttcatcgttcgtaaggaggcctgaatcttgaaacagcttttacaagacagctggtggaatcagctaaaggaagagtttgagaaaccgtattatcaagagctcagagagatgctgaagagggaatacgcggagcaaacgatttatccggacagccgggatattttcaacgcgctgcattatacatcatatgatgatgtcaaggtcgtcattttgggtcaagatccgtatcacgggccgggacaggctcaaggtttaagcttctctgtcaagcccggtgtaaagcagccgccttcgttaaaaaatatctttcttgagctgcagcaggacatcgggtgcagcatcccgaatcacgggtcgcttgtgagctgggcaaagcaaggcgttcttttgctgaatactgtgctgacagtaaggcgcggacaggcgaattcccataagggaaaaggctgggagcgactgacggaccgaattattgacgtgctgagtgaaagagagcggccggttatctttattttgtggggacggcatgctcaaatgaaaaaagaacggatcgacacctccaagcattttatcattgaatcgacgcatcccagcccgttttctgcgagaaacggatttttcgggagcagaccgttttcccgggcgaatgcctatttggagaaaatgggagaggcgccgattgattggtgtattaaggatttgtaaaaagcgcaggtgatctgcgcttttttatttgagtatttttcgaatcattcgcagcccgtttttggaggaaggataacgaaatgcgaagtcgaaacggttcgtttgtttgacgacgctttttttgtgcgtgaatgtgttaaaactgtcaaacccgtgatagctgccgatgccgctttccccgacgccgccgaatggcaaatacggcgtcgcaacatgcattaacgtatcattgacacagcccccgccaaacgacagatttcctaaaacagcgcgctcaatttctttgtttgtggtgaagagatacagggcgagcggcttagggcgcgattggactttctcaatgacttccccgatattgcggtatgtaaagagcggaagaatcggcccgaaaatctcctcctgcatcactggagagtcatctctcacttgttcgagaatggtcggcgcaattttgtgatgattgggatcagattgtccgcctgtgagcgggatgccatcattcagaaagctgagcagccgctgatagtggcgctcactgacgattttgccgtactgtggattccgttccggctgagggccgtaaaattctctgatcgcacgcttcatttcttctgtgagcttcgttttgatgtcctcgtggacaaataaataatccggtgcgatgcaggtttgtcccgcatttgtaaatttcccgaagacgatgcgtttggcggcaagctgaatgtcagcatctttatggacgatgcagggacttttgccgccgagctccaaggttacgggaattaattgtttggcggcggcctccatgacgatttttcctacagctacactgccggtaaagaaaatgtagtcaaagggctgctgtaataatgctgtgctgacatcgggcccgccttctgccatagcgacataatcagttggaaaaacgctgctgatgagtttggaaagaatagcagaaacagccggcgtatattctgatggcttgagaacgaccgtgttccccgccgcaatggcgccaatcaacggagaaagcgccagctgcaagggatagttccaaggcgcaatcaccaaaacggttccatacggctcagggatgatgatgcttttggagcctagatgagtcaacggcgttttgactcgtttcggcttggaccattttctcagccgtttcatgacaaagctgatttcctccaagacgattccgatttctgttgagtatgcttcttgctcggatttatggagatcctggtagagagcggctatgagatcggcttcatgagttctgacggcttgtttcagctttcgcaaaatgttcagtctcgattcaagcggtctcgtatgtcccgccgcaaaataggctttatgcttgctgatgatagaggggatgctgttcattccgtttctcctttttgtaaggtatggtgatttattatgtgaaaaatctcttctgcttgtcaatcgcgcaaggtttgtcagaaaaaataacaaactcatatctgcgttttcagcaggaatttgataaaatgcaggaagacaacatttatttttttggagggtgcttcatgaacattcatatatctgctttgattcaaaagatggaagaagagctaaaaaaagcaaaaacggctgaacgggatgaggagctgaagcgttatgtagcggttgtccgttctctgtgtgatgtcgtgcttgatcagccggagaacgcgagcgcgccccgcatacagccgagcgttacgccaagtcccgccgcgccgccatcgacagaccagctgatgatggaaaaaatgatggggagcgcgggattaaacaaatatcgaaagcaagaaaaagagaagcaggaagaggatggaaacggagagtctttatttgatttttaaagagagaggttgagcttacgtgaaattggttcttggcgcgctgcaatggacagcgtttattattgctgcggcgattgttgttccggtggcggttgcccagtcgtttcatctggatcactcagattctgcaagattgattcaaagcactttttttgtactgggaattgccgccgtcattcagtgtttgaaaggccacagactgccgatcaatgaaagcccagccggcttgtggtggggagtgtatacgatttacgcagggctgacgggaactgtgtttgcgacatatggagacacactgcggggtttgcagggagctcttcttgtaagcgctgtatgtttctttttgttaagtgttttcaaggtcattgacagacttgcaaaattgtttactccggttgtaacgggcgtctatttattgcttcttgtcatgcagctgagtcagcccattataaaaggaattctcggaatcggttatcgacaggacggggtggacggtcttgtatttggcctggcgcttgttgtgatcgctgccgcttttataatgacaaattcgaacatcatgttttttaagcaatattctattttattagccttgttcggcgggtgggtgctgtttgcggctgccggagccgcaaagccgattgaaatgccggaccggctgtttcagctgccttccctgtttccttttgggaccccgttatttaacagcggcctgatcatcacttctatttttattaccatcttgctgatcgtgaatatgctggcgagcatgaaggtcgtggacatcgccatgaaaaaattcagcaaacagcctgatggaaagcatcatgaacgccatgccggttttgcagcttcattcagccatctgcttagcggtttgacgggagctattgcgcctgttccgatttcgggagccgcaggttttattgaaacgaccaagatgccttctaaaaaaccgtttatgctcggcagtattctggttatcgtgatcagcgtgatcccgttttttatgaatacgtttgcgagcctgccgtcacccgttggatttgcggtgaattttgttgtgttctccgcaatgggcggtctggcctttgccgaatttgattcatatgagaaagaagaatcaaaaagggtgaggtctatcatcggtatctcactgctgacaggggtcggtatcatgtttgttcctgaaactgcgttaaagggattgcatccggtatttatttctctattaagcaacgggctcgtattagggacgcttgctgcaatagcagctgaccagttccagctttggcgcaggagaaaatccgacaatctcgtgtcaacggagaacaaacattgaattttggtgcaggtgcgataagataaatgatatgagtttaacgaaaaggcgggagagatagatgaaagtttttatcatattaggggccattaacgccctgcttgccgtgggactcggagcattcggcgctcacggattagaagggaaaatacctgataagtatcttcaggtttggcacacaggcgtgcagtatcatatgtatcacgcccttgggttattcgttgtcgcgtttctggctgataaattatccggcataggcagtgtcacgacagccggctggctgatgtttgcgggaattgtgctgttttccggaagcttatatattctaagtgtgacgcaaatctccattcttggagcgatcaccccgctcggcggtgtggcgtttattatttcttggattatgatcgttgtcgcagccgtcaaatatctataaacaaaaaagccaatcctcatcatatgagtgattggcttttttcttatcttggcgaataggacgccatggaatatggatacgtataagcaatttcttcatcaaatgtaatgtaatcgaggtagattgtcaggagcaggtagcgtgttcctgatttcgggtcgctgataataatgtgatcccggcccgcagcttcgatgacgccgcgaaaaatcttcgagccccattccttgctgttttcaaatgtcatataaatggtggccgtttttccccgattcaggcgcaaaatattctcgatgtaagattcctcaacaggcagcatgccgggaacgctttggcccggtcctgacggtgtaggccccgatggaatttgaaaaccgccgccctgctgctggcccgggaatccaaatccctgctgtccttgttgtccttgctgtccctgctgcattggcatcattggctgcatccccattgtctgcatttgtgagccttggccttgctgcgggtacgggttggcgccaaactgaggctgatacccctgcatattatcaaatgcctgcatttgctgatattgattttttttcggtttcatatcgttcctcctttttatgaaaaccattcaaaacatgttctggatgtataggtgaacgctccgcgatgactcacctccgatggaaaacgatcttagtcgctggtgcgatttttatctctttcaccttatgaggctgatgcttggattatgctgaaaaagaacagcggaccgatcagatttcgctctgggcagccgctgtttttcagaaacatacacaaacttttcgcatattggtttgtatccctagcgcaacttgagcataagcaacataagataacgatagtttcaggtgtgaagttccaagaaggaggtgtaggatttgcctaaagtatcagtcattatgacgagctataacaaaagcgattatgtggcaaagtccatttctagcatactctcacaaacgttttcagattttgaattgtttattatggatgacaactccaatgaagagacgctgaatgtaatccgtccttttttgaatgataaccgagtgcgtttttatcaaagcgatatatctggagtgaaggaaagaacagaaaaaacgagatacgcggcactgatcaatcaggcgattgagatggcggagggtgaatatatcacctatgcgacggatgacaacatctatatgccggaccgcctcctgaaaatggtgcgggagctcgatacccatcctgaaaaggctgtgatttactcagcctccaaaacctatcatttaaacgagaatcgtgacattgtaaaagaaactgtcaggcctgccgctcaagtgacatggaacgcgccgtgcgcaattgatcattgctcggtgatgcacaggtattcggtgcttgagaaggtaaaggagaagtttggctcctattgggatgaaagcccggcgttttaccgtataggagatgcccggttcttttggagagtcaatcatttttatccgttttacccactggatgaggagctggacctgaattatattaccgaccaatcgattcactttcagctgtttgaattagaaaaaaatgaatttgtcaggaaccttcctccgcagcgaaattgccgagagctgcgtgaatcattaaaaaagcttggaatggggtgagagcttgtcggcctatttaagcaattattgggtgctgtaccggaagtacgtggagctttttgacaaacttcgctacaaagggattccgcttgggcttatcagtaatttttatcaatacatcagccctgaactgagggtgatgatggaagaagaaccggaattattcggatcggtggatcagcatatcgatgagggacagattcagccgttttttgaagaaagaatccaaaacatcgttaaaacaaatgacgaacctgttaaagggaaagtcattttgcactttgattacctgcgtttttcaaacgaaaattactatcaatttgatcctgaaaaaacggctgttttggccagatggagtttgccgcattattgtgatctgcctgtaattagcaagcgggagattgcggattcatgccaaaaaggcgattcgaagcagtatctcgaaacagcctgttcgcttctcgccccttatgatgatcacccggcatttggtgatcaagcgtttcgcgaccggcttttcaaagatattcctttatttatagaggccattgatacagttgatgcgctgtttgaacaggaaaagatttcagctgttattgtcggaacggcagaagacatttacagcagggtgctcgctctcatgtgtcaaagaaaaggggccgtcagcatttgtcttcagcatggcgcattgatgggagatgaagccttcattcctgtttttacaacctatcaagctgtttttggtgcgtatgaagcagagtggttcatacgaaaaggctgtaaacccgagcagattctcgtaacgggacatccccgcttcgatcagatttttaacagaacgcctatggatatgtccatattctatcgaaaacttgcttttcagccgactaaaaaaattgtgctcattgccactcagcccttttcagaagacttttattccggtgtgctgcaggggctttctgatcagaagcagctgcaaatcattatcaaaccccacccgtgggaaatcggaaaaaacaagcttgatctgtatcacgaggcggcgaaaaaacatcaagcatgcagagtcatcaaaaaggagctggagctttatgatttgctgccgtatgttgatgccgcagtgacgcaaacctcgacagtcggtcttgaagccatgctgtttcaaaagcctgtgctgataggaaaatcgtccggaaatcgctcgtatccgtattatgagtctcttggcgattttatgtttgaccagccggatgaactggcgcacaccttggttgaggttcttcgaagtcccgacgtgcatcaaaaagcagaagaggcgcgcctggcattcatagcggctaattatccggtggcagaatcaacaaatgctttatttgcggaactgaaagccaaaacaggggttgattacaggcgggaagatactgaataaaatgataggagcgcaaagaaatggtgcaaaagagaaatcattttctcccttactcattgccgttaatcggtaaggaagaaattcaggaggttacagaaacgcttgaatcgggatggctctctaaaggcccgaaggttcagcagtttgaaaaagagtttgccgcgtttgtcggggcgaagcacgccgtggcggtgaattcatgtaccgcagctttatttttggctttgaaagcaaaagggattgggcccggggacgaggtcattacctctccgcttacgttcagctcgaccgccaatacgattattcatacgggagcgacgcctgtgtttgcggatattgacgaaaacacgctcaatattgacccggtaaagcttgaggcggccgtcacaccgcgaacgaaagcagttgtgcccgtccactttggcgggcagtcctgcgatatggatgcaatattggctgttgcccaaaatcatggtttattcgtgctggaggatgcggcacatgcggtatatacgacttataagcaaagaatgatcggttctatcggggatgcaacggcattcagcttttacgccaccaaaaacctcgcgacaggggaaggcggcatgctgacgactgatgatgaggagcttgccgataagatacgggtgctaagccttcacggcatgagtaaagccgcatggaaccgttattcttcaaatggcagctggtactatgaagtcgaatcgcccggctataagatgaatatgtttgatttgcaggcggccctcggacttcatcagctgaaacggctggatgatatgcagaaacggagagaagagattgccggccgctatcaaaccgcttttcagcagattcctgggctgatcacgccgtttgtccatgatgacggcaggcacgcctggcatctatatgttctgcaagttgatgaaaaaaaggccggggttacgcgcagcgaaatgattacggctttaaaggatgaatacaatatcggcactagcgttcattttattccagtacacattcatccgtattatcaaaagcaatttggatataaggaagcggactttccgaatgccatgaattactataaacgaaccctttctctcccgctctatccatcaatgtctgacgatgatgtagatgatgtcattgaagctgtgcgggatatcgtaaaaggggctgattaagtgtatacggtaaaagaaaatgtctccaaagaggcaattgaggaatttctccaaagcagaaagcttacattggatgttccgtatcaattttccctcggcctttttgaaaacagcaggctccaaggcgtattgctttacgaagattctttgtgggaaagcaaggtgcttcagaagaaagtcatgaacgtcaaacttcttgcggcaaatagtaccgggcagctaaagaggctgtttgaagctttttatactgtacgccaaatggatgaaacggattttatctttgtccgtgttccggctgaagatatcggagccgcgcatgtgatacaacagcagccatcctcttactttgtcgggagtttgctgaagctggcgatgcctccgtctttttatgacaaaacaccgccattttttgaactgggcccgcctgagcccggagacacagaagcgatatgtgagctggcccgagactcgtttacaaaaagcagatattttcaggatcctcatctcagccgcgatgcagcaaacgaaatatttcaggagtggacacgaaacaatctgaatggaagggcggcggtcaatattgtcgctaaacacaatggcgaggtcatcggctatcttcagggcttatcaagagatgatgagtgcattctcgatttgatggctgtaaagccgggatttgaagggaaacgtattgcgtttcatttattggcgaatctcatagaacaaccggagacccagaagcatagaacggtaacagcggggacgcagcttcacaatgtaagggcgatccgcctttatgaacgaatgggcttcaccgctgaacaatcgtattactattatcatatttggccgggcaaggaggcgaaataatggcagcgtttcagatcgcgaataaaactgtaggcaaagacgctcctgtttttattattgctgaggcggggattaatcatgacgggaagcttgatcaggcttttgcgctgatagacgccgcggcggaagcgggagcggatgccgtgaaatttcaaatgttccaagctgataggatgtaccagaaagatcctggtttgtacaagacggcagcgggcaaggacgtctctattttttctttggttcaatctatggaaatgcctgctgagtggattttaccgctattggattactgccgcgaaaagcaggtgatctttttaagtacggtatgtgacgaggggtcagctgatctgcttcagtctacctcgccgagcgcttttaaaatcgcatcctatgaaattaaccatctcccgctgcttaaatatgtcgcccggctgaacaggccgatgattttctcgacagccggagctgaaatctctgatgttcacgaagcttggcgcaccatcagggcagagggaaacaatcaaattgccataatgcattgtgtggcgaaatacccagcaccgccggagtacagcaacctcagcgtcattccgatgcttgccgccgcttttcctgaggcggtaatcggcttctccgatcatagcgagcatccgacagaagcgccgtgtgccgcggttcggctcggagcaaaactgatagaaaagcattttacgatcgataaaaatctgccgggtgctgaccactcgtttgcattaaatccggatgaattgaaagaaatggtcgatggcatcaggaaaacggaagctgagctgaaacaggggatcacaaagccggtctctgaaaaactgcttggcagttcatacaaaacaacgaccgccatcgaaggagaaatcagaaactttgcatacagaggcatttttacaacagctccgattcaaaaaggtgaagcctttagtgaagacaatatcgcagtgcttcggcccggacaaaagccgcaggggctgcacccgagattttttgaactgctgaccagcggtgttcgggctgtaagagacattccagccgacacaggcattgtctgggatgacattttactgaaggacagcccgtttcatgaatgatattctctttatcattcaagcaagaatgggttcaacaaggcttccgggaaaagtgcttcggccgctcggatcgaatcgtttacttgatattctcgttcaccgtgtccggcaaagcgcgttttaccaaaaggatcgggataatcttgtcatcgccacgtctgacaaagaaactgacgacatattagaggcgcactgtatcaaacaaggctttcgtgttttccgcgggagcgaagaacgtgtcctcgataggtttgtgaaggtcatagaagctgttaaaccgtcagtcatcatccggttaacaggtgataatccgtttgtcgatcctgagctgctcgatgtaatgattcaggcgcattttgatcaaggctcggattatacgtatatcctgaatgccccattagggatttgcggcgaagtggtcaacgccaacctgttaattgacatcagccgtattcaggctttggaggatcaatatcaggagcatgtcacgttatatataaggaatcatccagctctttatcgtgttcagtttttagaggcgccggaacgatttcgcgcccctcaatatcggctgaccattgatacaaaggaagactatgaatcgataaaggccctctatcaaaaagcaggcgagcgccccgatgtatccgcctcagagcttatcacccttctgaaccggaaccccgatgcggcaaccgaacgagaggctgactagccatgcatgttgggatcttcgcagacggcggctatgaaaagggaatgggccatgttgtccggatgaagaggcttgcggaggggctcaaacagcgatgcttgattacgttttatacgaatcaggattctgaagcgtttcttcatgaagagcattggcaggtcatcgtaaagccggagctgcagcagcacgaatttattctccgggaaataaaaagcaagaagcttgatttgcttttgtttgatattctaggcgcgcctgcagagctgttaaagaaaataaagacggagacagatgcgaaaattgttctttttgaagagaaaaacggtaaatcgattcaatatagtgacgcagtcattaacggaatttacggtgacatcagaagcagggtgtacgttcagggaaacacacgcatctatgaaggtccggactatcttattcttcaccccgcctttcaggccgcaagagaggattacacacttaagaaagactgccgcaatatccttgttgcattaggaggaagtgatccgaagcagcttatttttaaagtgctggctgccgctgatcaagtccccgacataaaagacaaaaacatgatgtttgtgatggggagcgcttcaccgcatcaagaggcagtccgaaggcggatcgaaaagaagccgcagtacaagatgatcgaacagacaaatgatatggcaggtttgatgaaacaagcggacgcagccattgtcgctggcggcatctctctatatgaagccatttgcatcggcgtgccgtgccttgttctttctcaggttgagcatcaaacggctacagccaaaacatttgctgaccaaggcgccgctcttgatcttggattgggtgagcttgtaccggatgaaacactcatctatcagatgtcacgcattatgagcagctatcctcttcgcctttctttgcacaagggaggaaggccgctcgtggatggcaaaggcattatacgggtaacagctattcttcaagatttatatgaacaagagatataaaaatgcatgtaaggaagtgttaatgtgaaaggtgttattttagccggaggaaacggctcacgccttatgcccttaacgaaagccgtcaacaagcatttgcttcctgtaggcccgtatccgatgatatactggtcgattatgaagctgcaggaagccggaataaaagacattttactcatcagccaaaaggagcatatgccgcaattttacaaactgcttgggaacggggaagagcttggcgttactatcacttatcaagtacagccggcagcatcgggcatttcggatgggctgtcttatgcaaagcgctttacgaaaaaagagtctttcattttattattaggtgataatatatttgaagattcattaaagccttatacagaacgctttgaacagcaggggaaaggagcaaaagtgcttctgaaagaagttgatgacccggaacgtttcgggattgctgagattgatgagaaaaacaagcggattcgttccatcatcgaaaagcccgaacagccaccgaccaacctttgtgttaccggcatttatatgtatgatgcagaggtgttttcatatattgaacaaatatcaccatcaaagcgcggcgagctggaaatcaccgatgtgaataatctatacatcgaaaacagccagcttacgtatgatgtgttatcaggctggtgggtagatgccggaactcacgaatcgctttatctcgcttcccagcttgtacaccaggctttacggaaaggacaggacgaaaagtgatggcaaaatcatatttaattacaggcggggccggcttcatcgggctcacgtttacaaagctcatgctgagggaaacggatgcgcgcattaccgttttagataaactgacgtacgccagccacccggaggaaatggaaaaattaaagcaaaacagccgttttcgctttgtaaaaggggacatcagcgttcaggaggatatcgaccgcgcttttgacgagacctacgatggcgtcattcacttcgcagcagaatcgcatgtggacagaagcatttcccaagcggagccgtttatcaccacaaatgtcatggggacataccgattggcggaagcggtcttgaaaggaaaagccaagaagctgattcatatttcaacagatgaggtatacggggatttaaaagcggatgatcccgcgtttacagaaacgacgccgctttctcctaataacccatactcagccagcaaagcaagctctgatttgctcgtgttgtcttatgtgaaaacccacaagcttccggccatcattacacgatgcagcaacaattacggaccttatcagcacagcgaaaaaatgattccgacgattatccgtcatgcgaagcagggcctgcctgttccgctgtatggcgatggactccagatccgagactggctgtttgcggaggatcattgccgcgcgatcaagctgattttagaaaaagggaccgacggcgaggtgtataacatcggcggcggaaatgaacgcacgaataaagagctggcgagtgtcattttgaagcatctgggctgtgaggaattgttcgcccacgtggaagaccgaaaagggcatgaccggcgctatgcgatcaatgcatcaaagctgaaaaacgaactgggctggcggcaggaagtgacgtttgaagaaggcattgcgcgtacgattcagtggtatacagacaatgaccgatgagaaggtgatctgattgacaaaggtattggtgactggggcgggaggacagcttggcttggaactatgccgccagctgaagcaagccggatatgaggtcattgcgttaacaaagaagatgatgaacattgctgaccagcgctcagtacggcattcgtttggccattatcagccggatatcgtggtcaatagcgccgcgtttacgtcggttgatcaatgcgagaaagagcttgataaagcgtacttgattaacggaatcggcgcttattatacagcgcttgagtcaacccgcatcggagctcaatatgttcatatcagcacggactatgtattcaatgggaaaggaacccagccatatagggaagacgatcccctcgatccgaaaaccatttatggcaaaagcaaaaggctcggagaagaactgatacgattaacgacaaaagacagcacgatcatcaggacatcgtgggtgtacggacatggcggcagtaatttcgttgaaaccatgctgaaacttgctgaaacgaaacaagagcttcgggttgtcagcgatcaaattggttcgccgacttatacgaaggatttagcagaagcggtcatcaagctgttcagccatccgccgggcatctatcatgtcagcaattcaggcatatgcagctggtatgagtttgcgacggcaattatggaagaaagcgggctggaaacagccattttgtctgtaacgacagaggaatacgggaacaaaacgccccgtccggcatactctgtgctgagccatcgggctattgaagaagccggcatccgcccccgccactggcgggaagcgttacgagagtatttgcaggaaaggagcagtgcgtgtgattgatggagtcaaggtgaaaaaattgatgaagcatagcgatgacagaggcttttttgctgagctggtccgggacgatgagaatctccttgagcattttgggcaggcctcttggtcgaaaagctatccgggtgtgattaaggcatttcattatcatgagaagcaggatgatctctggttcttcccaaccggccacgctcaggttgtcctatacgatcttcgagaggattcaaagacaaaaggagaaacggacgtctattatatgggcgaagacaacccgatgctgttattaatcccaaaaggggtggctcacggatatagagtgctgggagagacgccgctgacaattatctattttaccaccatgtcgtataacccggatcagcctgatgaaaaaagaattccgtgggatgatgagacgatcggttttaactggaacactgaattcagataaaaataggaacgtgatcaatcgaagagcagaggcatcttcgactttttttgcccttttttaaaataggataaaagatataaaatgtcaggcagatgttactagaaaaagagagggaaatcgtccatttgaaccttgtataaacaggaaggaattctcattgaattccaagtgttaatattccttaaaaaacatttacttccatggaaaatgatgatagattaatttttaagaaaaagaactggtaattcgcgaattatgaaaaagcgctttttctgcagaggacgctctggccaaatttcaacaatcaattagggggaaatgtcatgctaaaaagaacttcattcgtatcttcattattcatcagttcagctgttttactatcaatcttacttccttcgggccaagctcatgcacagtctgcatcaatcgaggcaaaaacagttaacagcacgaaagagtggaccatttctgatattgaagtgacatataaaccaaatgcggtgctttctcttggagcggtagaatttcaatttcctgacgggtttcatgctacgacaagagattcagtgaatggaagaacactgaaagaaacacagattttaaacgatggaaaaacagtcagactcccgcttacgcttgatttgttaggcgcatccgaatttgaccttgtcatggtgcgtaaaactcttcctcgcgcaggcacttacacgattaaaggcgatgtagtaaacggtttgggaatcggcagtttttatgctgaaacgcagctggtgattgatccccgttaatcgatagatttgtagtcagagactgagatgttttcagtctctttttttgtggattcaaaagctggtacggatcttgcatgatgataagggtgaatccaatgaagaaaggaattggcgggctgattttttaaagcgcttacattacagccggccaaaaaaacaatgaggtgaaaaagatgtcagcaaagcaagtctcgaaagatgaagaaaaagaagctcttaacttatttctgtctacccaaacaatcattaaggaagcccttcggaagctgggttatccgggagatatgtatgaactcatgaaagagccgcagagaatgctcactgtccgcattccggtcaaaatggacaatgggagcgtcaaagtgttcacaggctaccggtcacagcacaatgatgctgtcggtccgacaaaggggggcgttcgcttccatccagaagttaatgaagaggaagtaaaggcattatccatttggatgacgctcaaatgcgggattgccaatcttccttacggcggcgggaagggcggtattatttgtgatccgcggacaatgtcatttggagaactggaaaggctgagcagggggtatgtccgtgccatcagccagatcgtcggtccgacaaaggatattccagctcccgatgtgtacaccaattcgcagattatggcgtggatgatggatgagtacagccggctgcgggaattcgattctccgggctttattacaggtaaaccgcttgttttgggaggatcgcaaggacgggaaacagcgacggcacagggcgtcacgatttgtattgaagaggcggtgaagaaaaaagggatcaagctgcaaaacgcgcgcatcatcatacagggctttggaaacgcgggtagcttcctggccaaattcatgcacgatgcgggcgcgaaggtgatcgggatttctgatgccaatggcgggctctacaacccagacggccttgatatcccttatttgctcgataaacgggacagctttggtatggtcaccaatttatttactgacgtcatcacaaatgaggagctgcttgaaaaggattgcgatattttagtgcctgccgcgatctccaatcaaatcacagccaaaaacgcacataacattcaggcgtcaatcgtcgttgaagcggcgaacggcccgacaaccattgatgccactaagatcctgaatgaaagaggcgtgctgcttgtgccggatatcctagcgagtgccggcggcgtcacggtttcttattttgaatgggtgcaaaacaaccaaggatattattggtcggaagaagaggttgcagaaaaactgagaagcgtcatggtcagctcgttcgaaacaatttatcaaacagcggcaacacataaagtggatatgcgtttggcggcttacatgacgggcatcagaaaatcggcagaagcatcgcgtttccgcggatgggtctaatttgagaagcctccgcaaaataattttgcatttgttttttgcgtaaagagcaaaaaacgcaaaataaatttgcgttcaagatcggaaaaagagaaaggtgatcacctgttagacaaatttctgttcgattcaacaagttttttcagcaaaagacaagaaaatggcatgattcttgcatttttattcatatgcgaagatatatttcataacacgagggggactacatatgacagtcacatacgcgcacgaaccatttaccgattttacggaagcaaagaataaaactgcatttggggagtcattggcctttgtaaacactcagctcggcaagcattatccgcttgtcataaatggagaaaaaattgaaacggaccgcaaaatcatttctattaacccggcaaataaagaagagatcattgggtacgcgtctacagcggatcaagagcttgctgaaaaagcgatgcaagccgcattgcaggcatttgattcctggaaaaaacaaagaccggagcaccgcgcaaatattctctttaaggcagcggctattttgcgcagaagaaagcatgaattttcaagctatcttgtgaaggaagcaggaaaaccgtggaaggaagcagatgcggacacggctgaagcgatagactttttagagttctacgcgcgccaaatgttaaagctcaaggaaggggctccggtgaagagccgtgctggcgaggtcaatcaatatcattacgaagcgcttggcgtcggcatcgtcatttctccatttaacttcccgctcgcgattatggcgggaacagcggtggcagcgattgtgacaggaaatacgattctcttaaaaccggctgacgcagccccggtagtggcagcaaaatttgtcgaggtcatggaggaagcgggtctgccaaacggcgttctgaattacattccgggagatggtgcggagatcggtgatttcttagttgagcatccgaagacacggtttgtctcatttacaggttcccgtgcagtcggctgccggatttatgagcgagctgccaaagtgcagccgggccaaaaatggctcaaacgggtaattgcagaaatgggcggaaaagacacagtgcttgtcgacaaggacgctgatcttgaccttgctgcatcctctatcgtgtattcagcatttggatattcaggacagaagtgttctgcgggctcccgcgcggtcattcatcaggatgtgtatgatgaagtggtggaaaaagctgtggcgctgaccaaaacgctgactgtcggcaatccagaagatcctgatacgtatatgggtcccgtgattcatgaagcatcctacaacaaagtgatgaaatacattgaaatcggcaaatctgaaggcaagctattggccggcggagaaggcgatgattcaaaaggctactttattcagccgacgatctttgcagatgttgatgaaaacgcccgcttgatgcaggaagaaattttcggcccggttgttgcgatttgcaaagcgcgtgatttcgatcatatgctggagattgccaataacacggaatacggattaacaggtgcgcttctgacgaaaaaccgtgcgcacattgaacgggcgcgcgaggatttccatgtcggaaacctatattttaacagaggatgtaccggagcaattgtcggctatcagccgttcggcggttttaatatgtcaggaacagactcaaaagcaggcggtcccgattacttaattcttcatatgcaagccaaaacaacgtccgaagctttttgatttgagagaaataaaatcgtgcgattctttagcggatcgcacgatttcaactttttgatcaggaggacaatttatgcagtatacaaaaatcagtcacatgaatccggctgaaagagtggaggcgctgacagcatctctggtcagcctcagcagcgtgaacggcaccgttggagaagggacaaaagcagatttcatcaaagaagtgatcacgagctatccttattttcaggaaaaccccagtcatgtgtgggaacaggccattcccaatgacccatacaaacgcaaaaatatttttgcgtttattaaaggacatggagaaagccgaaatacagtcatttaccatgcccatctggatacagttggaattgaagatttcggccctttaaaggatatcgcttttgattgtgagaaattggccgagtatttcagccgctatgagttcgatcaggatgttcagcgggatgccaaatcaggcgagtggatgttcggaagaggatctgtcgatatgcaaagcggcatcgccgtgcatttagccaatctcctgcatttttcggagaaccttgagacgttgccgggaaatgtattgtttatggccaatcccgatgaggagagccagcattcgggcattctcgccagcatttcagagctgaaccggctaaaaaaagaaaaacagcttcactatttggctgctattaatacggattttattaccccgctttacgatggtgatcagacaagatatatctataccggagccgcgggaaaactgttgccttgcttttacatttacgggcgtgaagtccatgttggcgatacactggcagggattgacccaaatttcatttcatctgaaatcacaagccgtctccacaataacatccatctggcagaaaaggttgaaggggagttggttctgcccccatcctgtttgtatcagcgtgataacaaggaatcctataatgtgcaaacggctgtcagcaccagcttgtatttcaattgttttatttatgaaagaacagcaaaagaaatgatggatttgcttattgaagtcactgaggaagcatgccgggagacagaacaaaaattatcagattattacgaagaatatgtaaaaagagccaacctgccaaagaaacatttatcatggggcattcaagtgtatagcctggagcaatacttagaaaagctgagaaaccggggaatagatcccgagcagtgtatcgagcagacattcaaagccaacgagcaccttgaacttcgcatgagatgctttcaggcaatcgaagagcttcaaaagcttgaccccgatcaaggcgcaaaagtcattctattttacgcacctccttacctgccgcataactatttgaaagaagatagcgcaagagatcagcttttgcagcatgtgattaaagaagcggctgacaaaaccgctgaatcgacaggcgaaacatttgtcttcaaaaagtttttcccctacttggcagacggcagttttttatcactgcacgaaaccgatggcgaaattgattcttttatcaggaacttccctgggtggaatatgattgggaccattccgttcaaagacatacgcaagctgaatattccatccattaatatgggcgtgtacggaaaagacggccataaatggacagaacgagtctataaaccgtacacatttcatgtattgcctctcctcatacagcaaaccaccgttcatcttttgcaaagctaccggatgaccatcacggcaaaagaaccaaagggggaaggatgatgcagaatcataaaaatgaattgcagcgcagcatgaaaagcaggcatttgtttatgattgctttgggaggggtgattggcactgggctgtttctaggctctggctttaccattagccaggcgggaccgctcggcgccattgccgcgtatatcatcggcggatttttaatgtatctcgtcatgctttgtttaggagaattggctgttgccatgccggtggccggatcgtttcaggcctacgccactaaatttctgggacagtcgacaggctttatgattggctggctgtattggttcagctgggccaatacagtagggttagagctgacgtcagcaggcattttgatgcaaaggtggctgccctccgttccgatctggatatggtgcctcgtgttcggcatcgtcatctttttgattaatgcgctctctgtcagaagctttgcggaaatggaattttggttttcaagcatcaaagtggcggcgatcatattatttattgtgattggcggagccgctgtgtttggcttgattgactttaaaggcggacaggagacaccctttttgtctaactttatgactgatagagggcttttccctaatggggtgctggccgttatgtttacgctggtcatggtaaacttctcgttccagggaacggagcttgtcggcattgcggcaggggaaagtgaaagcccggaaaaaacactgccaaagtccattcgaaatgttatttggcgcacgctgtttttctttgtgctcgctatgttcgtcttggttgccatccttccgtacaaaacggcgggggtgattgaaagcccgtttgtagcagtactcgatcaaatcggcatcccattttcggcagatatcatgaactttgtcatcttaacggccattttatctgttgctaattcgggattgtatgcggcgtcgcgtatgatgtggtcactttcatcaaatcaaatgggtccctcctttctcaccagactgacaaaaaaaggcgtgccgatgaatgccctgctgattacgctaggcatttcaggctgttcgctgctgacaagtgtcatggctgcagaaacagtgtatttatggtgtatctcaatctcgggcatggtgacagttgtcgcgtggatgtccatttgtgcgtcgcaatttttctttcgcaggcgtttcctggcagaaggcggaaatgtgaatgatctggagttcagaacgccgctttatccgctagtcccgattctcggattttgtttatatggctgcgtgttgatcagccttattttcattccggatcaaagaattggcttatactgcggtgtgccgatcattattttctgttatgcatactatcatctaagcatcaaaaagcgtataaatcatgaaacgattgaaaaaaagcagacagaggcgcaatagaaaaagctctccgggaggccggagagctttttttacgtgttacatcctcatgtatttttagaatgaaatatagaaatatataatgggatttaaatgaaaataataaaacttataaatatttcgttcgaattgtaaatagagaaaaaacaatgctaaactataatacaactttatgataagaagattatggaagaggtgtttgagaaagaatgaacagcaatcaaaacaatgacatcaaaacaaaacatcattttccgttattgttggcactggctttaacgatgggggtatttgcagccggatctgaagagcttgtgatctcaccgctgctgccggatttagcaaaagccttcagctcagatgtcagcgtccttgcgttatctatcagtatttacggcgttatgatttttatcggtgcgccgcttttggttccattaggcgataaatactccagagaactgagcttattggccgggcttatgatttttatcataggaacggtgatatgcgctttagctcaaaatatttttttcttctttttaggccgggcgctttcgggattggctgcgggagcgtttgttccgaccgcttacgcagttgtcggtgatcgtgttccttatacataccggggcaaggtgatgggactgatcgtttcaagctggtcgctggcgctgattttcggagtgccgctcggatcatttatcggcggcgtcctgcattggagatggacgttttggattttcgccctgatgggtgttttagttgttctgctgattctccttgaaatgcgccgccatgcccaacataaaaacagcggcaaggaagaaatagaagagcccgcaggaacattccgggatgcgctgaaagtccctcgtgtacctgtttatatcacaataaccttttgtaatatgattggtttttacggtatgtattcctttttaggcacctatcttcaggacgtttttaccggaggaaacacggctgcgggcttatttatcatgatttatggaatcgggttttccatgagtgtgattacaggaaagatagccgaccgcatcggaaaaatgcgctcccttttgattgcgctgggggtcatcagcgttctgctggcgtgtttaccatatgcgccggcgtctatgtttctgttaatcgccagcctatttatttggggattaatgcaaagtttgacggtgacgctgctcagcaccattttgagtgactgctcagagcgtcatcgaggaaaagtcatggtgttttacagtctcgcctcgaatctggccgtgacattaggttctgctttaatgggacccgtatatgtggcatacggctatgcagctgtcggattgatttgcgccgccatcacagtcctcggatttgtgctcagtgtattcgcatataaaaagtacggcaaacttgagcagaaggccgatcagtccttatctcaataaacaaagtttctaaattcctataattaaaaaccctttttaaagggtttttttgtttgtatgggaataattatcaatattttcaaaaaacattgacagttcaatttccactggataaaatttacttaaaattttaaaagattggttggtgctcatgattatattggataatagcattcagacaaaaaaaagaactgattcactatccaaactcattacagtcaacacgctcggccctgaggggacaagcagtgagtacgcagcaaagcatttcatttccaattttactcttctacaagggctgaacagtaaattgtccttgcatgatacttttgaatcgtgcatcgaaaggacgctccaaagcccgctggaatataccatcgtcccacatgcttacgatggcattaagcatttctacatgaggccggatttgcagctattgcagatcttcaggtgcgatacaccgatgtacggcctggctgttcgtcctgattttgaattcagagacgatatgcttgatacatctgttattgtttcacatccttcacctattaatttaataaaatattttacccgcaaagatgttcgtttcaaactagtcaattcaaccagtcaagccgcaagaaaagtaaaagaaggtttgtatgacattgccttaaccaatgagcttgcacggcaaaagtacgggctaacctttgtaaaaacattcaaaagcattccaatgagctggtcattatttggaaaaggagacgttgatgatgaaaactaaagaagatatgcaggagctttatttcccgacaccgaaattaattgaatgggaaaacggagtgaggcagtattcaaccgtacgaggggatactgaagtattaatgtcttacgtcccgccgcataccaatgttgaaccccatcagcataaggaggtccaaatcggcatggtcgtttctggcgagctgatgatgactgtcggagatgtgacaagaaaaatgacagccttggaatctgcctatatcgcgccgccgcatgtgcctcacggggcaagaaacgacacagaccaagaagtgattgctattgatatcaagcggctgaaagctgatgaaacatatacaagtcctgaggactactttttggatattttcaaaacaagagacctgctgccgggcatggaagtcacgttctttgttgaggattgggtagaaattatgcttgccaaaatccctggaaatggcggagaaatgcctttccataaacatcggaatgaacaaataggcatctgcatcggcggcggctatgacatgacggtcgaaggctgcacagtcgagatgaaattcggcacagcctatttctgtgagcctcgcgaagatcatggtgccatcaaccgttcagaaaaagaatcaaaatcgattaatatcttcttcccgccgcgctataacagggcaaaagcaaaaaaaatgaaggcggatgaatgatcatgaacctcaccgataaaaccgtcctcatcacaggaggcgcatcaggcattggttatgctgcggttcaggcttttttgggccagcaggccaatgtggttgtggcggatattgatgaagcgcaaggagaagcaatggtacgaaaagaaaataatgacaggctgcactttgtgcaaacggacatcacagacgaagctgcctgccagcacgcagttgaatcggcggttcatacatttggcgggctcgatgtcttgattaataatgcaggcatcgaaatcgtggcgcctattcacgagatggagctcagcgattggaacaaggtgctgcaagtcaatttgaccggcatgtttttaatgagcaaacatgcactcaagcatatgctggccgccggcaagggcaacatcattaatacgtgctctgtcggcggactcgtggcatggcctgatattcctgcttataacgccagcaaaggcggggttttgcagctgactaaatcaatggccgttgattatgcgaaacatcaaattcgggtgaactgcgtatgcccggggatcatcgacacaccgctgaatgaaaaatcattccttgaaaataatgaaggcacacttgaagagattaaaaaagaaaaagcgaaggtaaatccgctgctgaggcttgggaaacctgaagaaatcgcaaatgtgatgctgtttttagcctcggatttatcaagctatatgaccggaagcgccatcaccgcagacggaggatacaccgcacaatagagaaggagtgttttacatatggagagaaaaacagtattggtcatcgctgatcttggaggctgcccgccgcacatgttttataaaagcgctgctgaaaaatataacctggtcagctttattccaagaccttttgcaattacagcctcccatgcagcattgattgaaaaatactcggtcgcggtcataaaagataaagactattttaagagtttagctgattttgaacaccctgattccatttattgggcgcatgaagatcataacaagcctgaggaagaggtcgtcgagcaaatcgtcaaggttgccgaaatgtttggggcggatgccatcacaacaaacaatgaattattcattgctccgatggcgaaagcctgtgaacgtctgggcttgagaggtgccggcgtgcaggcagccgaaaatgccagagataaaaataaaatgagggacgcttttaataaggccggagtcaaatcgatcaaaaacaaacgagtcacaactcttgaagatttccgtgctgctcttgaagagatcggcacacctcttatcttaaagcctacatacttagcgagttctatcggtgtaacgctgattacggacactgagacggcagaagatgaatttaacagagtcaatgactatctgaaatcaattaacgtgccaaaggcggttacgtttgaagcgccgtttatcgctgaagaatttttacagggtgagtacggagactggtatcaaacagaagggtactccgactatatcagtatagaaggcatcatggctgacggtgagtatttcccgatcgccattcatgataaaacgccgcaaatcgggtttacagagacatcccacattacgccgtccattctggatgaagaggcaaaaaagaaaattgtcgaagctgccaaaaaggcaaatgaagggcttggactgcaaaattgcgcaacacatacagagatcaagctaatgaaaaacagagaaccgggtttaatagagtcggcagccagatttgccggctggaatatgatccccaatattaaaaaggtctttggccttgatatggcgcaattattattagatgtcctctgtttcggaaaagacgccgatctgccggacggattattggatcaagagccttattatgttgccgactgccatttgtacccgcagcatttcaaacaaaatggccaaattcctgaaactgctgaggatttggtcattgaagcgatcgatattccggacgggcttttaaaaggggatactgaaatcgtttctttttcggccgcagcaccaggcacttcagttgatttgacattgtttgaagctttcaattccattgctgcatttgaactgaaaggcagtaattcacaggatgtggctgaatcaatcagacaaattcagcagcatgcgaagctgacggcaaagtatgtgctgccagtatgaaacagctgaaacccaactctaaatacttgctttacgggcaggcgctatcgttcatgggagactattgtgttctccctgccctgctcattttgtctacatattatcacgattattgggtgacgtccggggtcatcgtggtcagaagcattccgatggtgtttcagccgtttttgggtgttctggtcgaccggttagacagaattaagatcatgctgtggacggatatcatcagaggcatcatctttttggggctcacatttcttccaaaaggcgagtatccgctgatttttctggccctgctgtttattacttatggaagcggcgtgttttttaatcccgcccgtctcgctgtcatgtcgtccttggaatcagatattaaaagcatcaacacgttatttgcaaaagcgacaaccatctccattatcgtcggggcggctgccggagggctctttctgttaggcggatctgtagagctggctgttgcctttaacggtgtgacatacttggtttcggcattttttatcagccgcatcaagctgcaatttgtgccgattcaatctgaaaacattaaagaggcctttcagtcttttaaggaaggactcaaggaaatcaaaaccaattcattcgtattaaacgccatgtttacgatgattacaatggctttgctgtggggagttgtgtacagctattttccgattgtcagccgctttctgggtgacggggaaatcggcaactttattctcacgttctgcatcggcttcggcggctttatcggagcggcgcttgtcagcaaatggggctttaacaacaatagaggcctgacgtactttaccgttttatccattgtctcgctggcgctgtttttattcacaccgatattcgctgtttctgtcatcgcggcgatcctctttttcatcgcgatggaatacggggaagtgcttgcaaaagtgaaggttcaggaaaatgcggcaaaccagattcaagggcgcattttttcagtggccgaagcgtctatcggattatgcatttctattggttcaatgttcattaacatcctaagcgctccggtcattatggggctgattgtcgtgatcgtatgcggtttgtttttgcatacgaagctcgtcaacaaatcgtttttggaacgggataacaaaacggagcaaaaaggagtcttttagatggaaataacaccgtccgatgtcatcaagacacttccaaggcaggagttttctctcgtttttcaaaaggtaaaggaaatggaaaaaacgggagcccatatcattaatctcggacaggggaaccctgaccttcccactccgccgcatattgtcgaggctttgcgggaggcttctctgaatccttcgtttcatggatacggccctttcaggggctatccttttttaaaggaagcgatcgccgctttctataaaagggaatacggagtgacaatcaatcctgaaacggaagtcgcgcttttcggaggcgggaaagccggattgtatgtgctgacacaatgcctgctcaatccgggagacatcgctttagtcccgaatccaggctatcctgaatatttatcagggattacgatggcgcgagctgagctttacgaaatgccgctgtatgaagaaaatggctatctgccggattttgaaaagattgatccagccgtgctggaaaaagcgaagcttatgtttttaaactatccgaacaaccccactggagctgtggctgatgcggctttttatgcaaaagctgctgcttttgcgaaagagcataacatccatttgattcatgattttgcatacggggcgtttgaattcgatcaaaaaccggccagctttcttgaggcagaggatgccaaaactgtcggagcagagctttattcattttcaaaaacatttaacatggccggctggagaatggcgtttgcggttgggaacgaaaaaatcattcaggccgtcaatgaatttcaggatcatgtatttgtcggcatgttcggcgggctgcagcaggcagcgagtgcggcgctttctggagatccggagcatacggaatcgttgaaacgaatttataaggaacgaattgacttttttacggcgctttgtgaaaaggaactgggctggaagatggaaaagccaaaaggaaccttttacgtatgggctgaaattccgaatacgtttgagacatctcaccaattttccgattacttgctggagcatgcccatgtcgtagtcacaccgggcgaaatttttggaagcaacggaaaaaggcatgtcagaatctcaatggtgtcgaagcaggaggatctgcgggaatttgtcacgcggattcaaaagctgaacctgccgttcgggtcattacaagaaacatcccgctaaaaagcgggatgtttttatatgcttttcatgctgccgccgtcagcggaaatttgctgtcccgtgatgtaggaggcttcctcagaggcaagaaatgcggcgagcgctgcggtttcttcggctgatccgacccgtttcatcggaatcccggaagcaatctgttcttctgctttctgtttggatatgctgttctttttcatcacattttccacaaattgatgataacggtctgtagcgataaaaccaggattcagacagttgacagtaatgttgtgaggagcaagctggatggaaatatttttactggcgttaattaaagcggcattcatcatactgtttgtgaacatgttggcgccgggttctttccacagatttccgacaatgttgatgattctgccaaactcgttttgtttcatcagtgaggaagcacgcttgattgcgtcaatataggcaacggtcttttgagtgaacgtggccgtcatatcctctatattgcagttatcaaatgtgtcaggcgcgccgcccgggatattattaatcagaacatcaagccgtccgcattgagattcgattttctgaaaaatgcccgctctcgtatgctggtcagacatatcgcccgcaaggacaatgacgctcgcctcaggatgcttggccaaaatgtcttctttgacagattcaatattatccaaatttcgcgaattaatgacgagggaaaagtgctggtctgctaatttcagagcgattgctttcccgatcccttgactggctcccataacaaatgcggttcgttttgacaaataactgcacccctttgaaaaaaatggattattatctacatcgtaagaaaaaacgaagaaaatagcaaattttatttaaattctgataaaggagaattgaaaaactcccgccggatagggcgggaggggatattatacatataagaattgaggaagtgtatcaagcgaaaggtgattgccgacaaagaatgaaccaaattcgccatagcgagcgctgacttcgtcaaaacgcatttcgtacactagcttcttgaattgaaggacatcatcgctaaataatgtaacgccccactcgtaatcgtcaaagccgacagagccggtgatgatctgtttgactttgcccgcatagctgcggccgattaaaccgtggcttctcatcaagtttctgcgttcttccattgaaagcatataccagttgtcgttgccagatcttcttttatccattggatagaagcatacatatttagattccggcagttcagggtaaaggcgagcgcgcacatgcggattttcataaggatcgccgtcaccgcttgccaagtagttgctcagctctaccactgatacgtaggagtatgccggaatggtgaactcagcaagtcttgatttgttgaattcaagctcaatttgatttaattcttccattgtaggacgaaggatcatcagcataaaatcagctttttggccgacgatgctgtaaagagtttgcgatccttttccttctttttgggctacgccccatttttcaagcaacccggtgaattcatgtatgatagattggcgctcatcactggacagaagcttccaggaagcccaatccattgtgcggaaatcatgaagcgcataccagccgtcaagcgtttttgccgcttcattcgtcatttgctgttcactcatttatcttcactcccattatcttttcatgattgccttcactataccatagtttatccgattctactgtggagaaaccttgaacatcccttccgtataactccatcaaaatagaagaacctataagggaagattgagtcacttaaattagttagaaaaataagatttttttatgaaagcgctataatgaaagttggctgtttgaatttgattggaagaagagtatgctagtaaaagaaagcgtttttgtaactttttgaggaggttttattgtggcagatttattttcaacagtgcaagaaaaagtagctggaaaagacgttaaaattgtatttcctgaaggcttagacgagcgtattttagaagcggtcagcaagcttgcaggaaacaaagtgctgaatccgattgtgatcggcaatgaaaatgagatccaagcaaaagcaaaagaattgaaccttacgctgggcggcgttaagatttatgatcctcatacatatgaaggcatggaagaccttgtacaagcattcgtagaacgccgcaaaggcaaagcgactgaagaacaggctcgtaaagcattattagacgagaactacttcggtacaatgctggtgtataaaggacttgcagacggacttgtaagcggagctgctcactcaactgctgacactgtccgcccggctcttcaaatcatcaaaacaaaagaaggcgtgaaaaagacttcaggcgtgttcatcatggctcgcggagaagagcaatacgtattcgcagattgcgcgatcaacattgcacctgacagccaagatcttgccgagattgcgatcgaaagtgccaatacggcaaaaatgttcgacattgagcctcgcgtggcaatgctcagcttctctacaaaaggctcagcaaaatctgatgaaacagaaaaagtagcggatgcagtgaaaatcgcgaaagaaaaagcgcctgaactgacacttgacggcgaattccaatttgatgctgcatttgttccatctgtagctgagaaaaaagcgccggattccgagatcaaaggggacgctaacgtattcgtattcccaagtcttgaagcaggaaacatcggctataaaatcgctcagcgtttgggcaactttgaagcggtaggaccaatcctgcaaggtttaaatatgcctgtaaacgacctttcaagaggatgtaacgctgaagatgtttacaatctcgcattaattacagcggcgcaagcactgtaataaaattgaagacaatggcagctctcgaccgagggctgccttttttgcgcttctgtatagcccttctttaccaagacggatgatatgagtacaataaagaaaactaatcataaccatatatttcattaatgacaggggtggggtttttgtattacgacgtgctgaaaacgtttatagcggtggtagaagaaaaaaacttcacaaaagcggcggaaaagctgatgatctcccagcccagcgtcagtctgcatatcaaaaatcttgagaaagaatttcaaacggctcttctgaacaggtcgccaaaacactttacgacaacgccgacaggagacattttatatcaaagagcaaagcaaatggtgtttctctacgaacaagccaaggctgaaatctatgcgcatcatcactatgtgaagggtgaattgaaaatagctgcaagctttacaatcggtgagtatattcttccgccgctattggcccagctgcaaaagctgtatccagagctgaatctagatgtcatgattggcaatacagaggaggtcagcgagcgtgtgcggatgcttcaggctgatatcgggctgattgaaggacatacaaacgagaatgagctggaaattgaaccgttcatggaggatgaaatgtgcattgccgctccaaatcagcatccgctcgccgggcggaaagagatttcgatcagcgatttgcagaacgaagcgtgggtgacaagagagaaaggctccgggacgagagaatatctcgatcatgtactcagttcaaatggacttcggccgaaatcaatgtttaccatcagcagcaatcaaggtgtaaaggaagcggtgattaacggcatgggactttcggttctatccagaagcgtgctgcgtaaggatttgatccaccgcgaaatttcaattctgcatattaataatttctcgttaaagcgcaagctgtcttacattcattctcctctcatggagaatacaaaaaataaagaaatttttattacgatgctgaaaagcaattatcaatcacagctgctgaaatgatataatagttttcgttcaataagcctaacatgaaagggttttacatagatggcaaaccaaccgattgatttactgatgcagccgaaatggagagtcattgaccaatccagtctcggccctttatttgatgcgaagcaatccttcgcaatggatgatacgctatgcatgtccgtcggaaaaggcgtgtcgccggcgacagcgcgctcatgggtgcaccacgatacaattgtccttggaatacaggatacacgcctcccgtttttgcaggatggtatctccttgctggagagcgaaggataccgtgtgatcgtacgcaattccggcggtcttgccgtcgtattggatgacggtgttttaaatatctctctcatattcgaggacgaaaagaaaggcatcgatatagacaaaggatatgaagcgatggtcgagctgatgagacgaatgctgagaccgtacaacgcaaagatcgaagcctatgaaattgaagggtcttattgtcccggcagctatgacctcagtataaatggcaaaaagttcgccggcatctctcagagacgcgttcgcggcggagtcgctgttcaaatttatctctgtgcagataaaagcggcagtgaaagggccgacttgatcagacgattctatcaagcggcgctgaaagacaaacaaaacgataaaaaaggcgtctatccggaaatacgtccggaaacgatggcgtccttaagtgagcttcttcaaaaagacatctccgtacaagacttaatgttcgctttattgacggaattaaaagcgttaagcacccatctttattcagctggactgtccattgatgaggaaatggaatttgagaaaaacctcgtccggatggctgagcggaatgcaaaggtatttgggtgaacgttcttcgcatgccggctgtatatgccggcatgcattttttatctcaagcggcattttacctcaataatcttattttcagataagtccttcttacatacagataaccacgacaaaaagaaaaacgataaaatgacatcagcatccatattaaaggggagaggcagatgaaggggaatatttacagcctttttgtattgattgcggcttttttctgggggaccacgggaaccgttcaggcattggctccagaaagcgccacaccgctggcatttggagcgttcaggttattaataggaggaagcgccatgctgcttgcggtttggatcagccgggagcttcacgtgaaaaattgggcatggccgctcgtatttttagccgctgtttgtatggcgtgttaccagccgctgtttttcacagcggttaaagaaacgggaattgcagtgggaactgtgattgccatcggcagtgcgcctatcattgccgggaccctcgaatgggctgtattgaagaaacgcccgcgaaactcctggtggattgcgactgtgctggctttagcgggttgctggcttctgttttccgacagttccaatgttcggattgatgtggctggtgttcttatggcgcttggagcgggtgcttcttttgcaggctatacgctcatcagtaaagcgatgatgaaaacccagcctccgcgagcgacctccgccgttgtattcatgatcagcgccatcttgctgacgccgctattatggcagttagatatctcgtggatattgacccctagaggactgggaacaagcctttacatcgggttaattgcaacatgtgccgcatactttttgtttgcgaaagggcttaccggggttccggcctcggcggcggtcacgctgtctttagctgaaccgctgacggcttcattgcttggcgtgtttttcataggggaaatgctttcgccttcctcgtggctgggcattgcgcttatgatgctggggcttttggtcatttctgctgcgcctcggaaacaaaaaacggccgaggcagctcacatgtcttaatagattcacataagcttggcctcattttacaagaatagctgatccggctgcaaaatgaggaaattctcttttctcaatagaaaaggggattttgcacatggcgaaaatcccaaaacagctgcccgttttgggatttttctatgtcattccgctaatttttctaaattgccgttccggtccattttgaaggacggagaggcatgttcatcttcttcaaataaaactagctttctggctctgttcataattttcaccaaggtttcataatcttcttggatcgttttttggtctttttcaagcttttgaacttctgcctctagctgctctgttttgttttgcaattcctgattttctttctttaaacgctcgttttccatttttaatgctgatgattgctcgtgattgccttcgtaattctgcaggaagcggatcacatcattcatcgtcatctcaggcgcagctgcaggcgtttgaggagacaataagtgtgatagactagctaactcttccttaaagctttcatcaacaaaaggcatgtgttcgccagacattaaaggttgctcattttcgacagatggtgtttccgttttaaccggctcttctgcagcggtttcttgaatgatttcaggatcaacggcaggaggctgatataataatctttttttcgcgggctgcccgtttccgagcgctctcatccgctgttttcgttgtttcttcgcaagctgaagcgctttttcatattgatggcggaccactgcgttccatctgaatccgcaggctgcggatgtccggtttaatttatcgccgacttcttcaaaggcgttcagctgagtgctgccctccctcacatgccgaagcactgtttcggctaaaagcagatcgttttcctctgaccaagcgtcttgtcgctgttttgtcatttatctcaactcccatttttcttttcatggtattagaatgtccaggttggaaaatatttatacaaattggctgaaagaataggagatacgaaggatggagcggcttgcaggaacagtcgaatccttgtaaaatgaagtgtgatgtgattttttttgaaacgtgattttaggttattcacatagatgaacatagaaatgaagggaagcgtacgtcatggctaatgaatttcgagtgtgtgatgattgccaagccactaatatcaaaacattgctgccgcgtttgaaagaagtggacccggacgcaaaggttgaggtaggatgccaatcttattgcgggcccggacggaaaaaatcatttgcttttgtgaacaatcgcccgctgtcagctccgacagaggatgagctgattgacaaagtaaaaaagaaaataaaaaagtaaaaacatattttttcttagcctcggccctcaggtcaggcttttttgcttcacaagatgtgtttttcatgaagatggaacaaatcgccgggcaaattcaaggatgttttcaaagaatagagtcgatataatagaaacacggctaaaaaaaagagggaatgacgatggcgtatccaaatggaaaattatcagaagaaaaagtgtttaaagatccggtgcaccgctatgttcatgttcgggacaagctgatatgggatttgatcggaacccgtgaatttcagcgtctccgcagaattaagcagctcggaacgacctatttgacgttccatggggctgagcacagccggttcaaccattctctcggtgtctatgaaattgtcagaagaatggttgatgacgtctttaaaggccgccctgaatgggatgacagtgagcgcgaactctgtttggccgcggcgctgcttcatgacctcgggcacgggccgttctcgcattcatttgaaaaggtctttcaccttgaccacgaggattttacaagaggtatcattttgggagacacggaggttaatcaggtgctcagaaaggtgagcccgggtttccctcaggatgttgctgaagtcattgccaaaacatataaaaacaagcaagtggtcagcctgatttcgagtcagattgacgcagaccgcatggattacctccagcgcgacgcatattatacgggcgtcagctacggccattttgatatggagcggattcttcgggtgatgcggccgcgcgaggatcagatcgtcattaaagaaagcggaatgcacgctgtcgaagactatatcatgagccgttaccaaatgtactggcaggtctacttccatcctgtgactagaagtgcagaggtcattttaacgaagattcttcacagggcgaagcagctgcacgatgaaggctatgtcttcactcacgctccggttcatttctattctatttttgaaggaaaattgacactggaggattatgtaaagctggatgaatctattattttgtattacttccaggcctgggaggatgaagaagacgcgattttatccgacttgtgccgcagattcattaaccgccagcttttccaatacgttgaattcaatccgaatgaagaaatgtcggcttattttgagctgacttcattgttcaaagaggcggggatcgatccgagctattatttggtcgttgattcttcatcagatctgccatacgatttttaccgaccaggagaggaagaggagcgtctgccgatccatctcttgacgcaaaacggccaaattaaagagctgtccagacagtcggctattgtggaatccatctcaggtaaacggcggacggaccacaagctgtactatccaaaggacttgatttgtgacggcactaaacatccggaagcgaaaatgaaaatccggcagctgctgggactgacatagaaattggaaagaaggaaaaaggagatgtcgggaatttgttgaaagaacatgcaaaactgatgaaggtgttctcggattctggagaaatcatcgggcgaaagaagctgcagaaaatgatttatatcgccaagaaaatgcagtttcctttctatgagaaatatgattttcacttttacggaccatattcagaggaactgacgctccagattgaagagctgtgcaaccttggatttctgcatgaggtgaaggaaaaaaagggcggctactttcaataccggtattcgctgactgagacaggctccgcatttttagaccatgctgatctggacatgccggatatgaaaggctatatcgacagtgtaaacagccgttcatcacggtttttagagctggtttccacgatcctttactttgacgggcttgaggatgaggaaaagaaagaaaaagtctttaccatcaaaagcaagcaaaaatatacaaatgaagaatatgacgaagcgcttcaatacatagaggaactgaagcagatttgttaaccataccaagcaaaagaaatgatccgtttcttttgctttttttattgacaaaagctgctaagagattcattatggataatagttatccataatgaatcaggagtgaataggatgaaaatgaaatcaggaatggagcaggcggtttctgtgctgctgttactgtcacggctgccggtacaggcttctttgacgtcagaggctataagccagcgattgcgcgtgtctccgtcttacttgaagaagctgatgagaacattggttcaagccggtttggcagaatccttaccagggacgaagggcggttttaccctgacgaagcctttggctgacattacgctttatgatgtttatcaagcggtcgaaggcagaggttcgatgtatcaggggaaaggcttgctgcaatctgtatttgagggtgaaagtcactgtgtgctggagacagtcatggcggaaatcgaggataaatggtccaatcttatgagagaagaatccttgcagcatgttatggacagagtcggggaattgtatgatcttgaaaaaatagatgattgggtaatcaagcaagtgaaagggcaattgtaatgaaaaatagcgggtctatacaagaatcaacatcatcaacaggcatatccgtgctgatcgtgctcgcacttggtttcctcatggcaactcttgatgtgaccgttgtgaatgtggcgatggctgatatgaaaaacactctttcaatgtcactttcaggtgtaacgtgggttgtggacgggtacattcttacttttgcgtcgcttctgctggcgggcggagccttggctgaccgtttcggctcgaagacgatctatatcttgggtctagccgtttttgttatggcctcctgtctatgcgctgcatctataaatgggcagatgctgattgccggacgtctcatacagggaattggggcagctttgtttatgccaagctcactcagccttttggctgcctcttaccttgatgagcgggcgcgggcgagaatgtttggactgtgggccgcgcttgtttccgccgcttcagcccttgggccttttatcgggggcgtgctggtacagttggcgggctggcagagtatttttctgatcaatgtgccaataggggctgctgcgctcatttcagcttaccgaatcctcagccgcgttcctgggaaaagcagccgcgtgaacatcatcgggcatctgcttggcatgatggctctcgggtttctttcctatgctttgatacaggggccttcagcgggctggcgctcgccagtgattcttgtagcatttactgcagcggttttggcatttgtgctgtttttgctgcgggaaatttctgcaaaaacacccatcctgccggcgtccttatacaaaaacggccgcttctcagctgcccaatttatcgggtttttgctgaatttcgccctttttggcggcatgtttatgctcagcctttttttgcaggaagcaggaggggcaagttcctttatggctggagtggagctgctgccgatgatggcggtcttcgtgatcggcaatctgctgtttgcccgtctggcgaatcggtttgaagccggtcagcttatgtttgtatcaatggcggtcagctgtatcattgcattgctgttgtttgtgctgatttctccggattttccttattggcagctggcggtgttgatgtctgttatgaacctctgtaccggtattacagttcctgccatgacaactgtgatcatgcaggctgccgggcaaagacatacgaatatcgccggtgcggcgttaaatgcaaaccggcaaatcggagccttggtcggcgtagcgataaccggggtgatcattcatctgtccgccacttggtatgctggtgccgggtttgcgtttttgatgatgggagcggcatacagcctcgctgcattgcttgtatggctgtttctggctgcccataacgggactgccgcgtcagaaaaaatgtaaatcactgattgcgctttgtgggaatatatagtaagatataaaaaattattgaaacaacaggcactgataaggacacgagatgctttttacggtttccagagagggaaggacagctgagatcttcctaacgcagggaaagcagcttaccgcctttgagccgtatcagggaaaacaagtatctgataccgtcatgctgcgttacagcatctttaagccgatcatcatgtgtaattgatcgggaatttgggtggaaccacggatgatcaacacattcgtcccttttagagggatgggtgtgtttttttatttgaattgaatacatgcgaagaaaaggacatgaatgatagttacggttttcagagagggaaggaaaggtgagagcttcccagcttaggaatatcatttaccgccttggagcagcattggggaactgaagtaaccaatgccgtctatgctgcgttacagcaccgagccgacaacatagtatttgtcgggaacttgggtggaaccacgggttaatcacacactcgtccctatctgtgggacgggtgtgtttttttatgaattgaatacatgcgatgaaaaggacatgaatgatagttacggttttcagagagggaaggaaaggtgagagcttcccagcttaggaatatcatttaccgccttggagcagcattggggaactgaagtaaccaatgccgtctatgctgcgttacagcaccgagccgacaacatagtatttgtcgggaacttgggtggaaccacgggttaatcacacactcgtccctatctgcgggacgggtgtgtttttttatatacaacaatgaataaggagtgttctaaaatgagcaaacatgtacacattcagcttccggacggacagatccaggaatatccgaaaggcatcacaatcaaagaagcggctggttcgatcagttccagtctgcaaaagaaggcggccgcaggtcaggtcaacggcaagcttgttgatctcagtttcaagctggaggaggatgctgagctttcgattgtcacactcgattcacaagaaggcttgcaggtgcttcgccacacaacagcgcacgtgctggcccaagcagtaaaacggctgtacggcgaagtgtcattgggggtagggcctgtgattttagacggcttctactatgacatgaagctggggaaaagcttggcatcaggagacttagaggccatcgaaaaagaaatgaaaaacataataaatgagaaccttgaaatcaaacgtatagaggtttcttacgaagaagctgaagagctgtttgcacaaaaagacgagcggctcaagcttgagattttaaaggatattccgcgcggggaggatatcacactgtaccagcaaggggaattcgttgacctgtgccgagggccgcatcttccttctacagggatgatcaaggcgttcaaactgacaagagtatcaggcgcttattggcgcggagacagcaaaaatgaagtcctgcagcgggtgtacggggttgcgtttcaaaagaaaaaagatttggatgcgcacctgcatatgctagaagaagcggcaaaacgagaccatcgcaagctcggcaaacagttagggctgtttatgttttctgaagaagcgccggggatgccgttttatttgccgaaagggcagattgtccgcaatgagctggagcgcttctcgcgtgagctgcaaacaaatgccggctacgatgaggtgcgtacgccgtttatgatgaatcagcggttatgggagcagtcaggccattgggaccattatcgcgacaatatgtacttttcagaagtggatgatacaagattcgcaatgaagccgatgaattgccccggccacatgctcatctttaaaaacagcctgtattcttatcgggatctgccgattcgcatggcggaattcggacaggtgcaccgccatgaatacagcggcgctttaaacggaatgcttcgcgttcggacgttctgtcaggatgacgcccatattttcgttcgggaggatcagattgagagtgagatcaaagaagcgattcggctgattgatgaggtatatcggacatttggtttcgagtattctgttgagctttcgactcgcccggaggattcattaggcgatgacagcctttgggaagcgtcggaacgtgccttagcacgcgtccttgaggagcttggcctctcttatgagatcaatgaaggcgatggggcgttttacgggccgaaaattgatttccatataaaagatgccctgaaacggagccaccaatgcgcgacaattcagcttgattttcaaatgccggaaaaatttgatttaacatatatcaacgaactcaatgagaaggttcgtcccgttgtcatccacagagcggttttcggctcaatcgaccgtttcttcggcattttgatcgagcattacggtggggcttttccagtctggctcgcaccgatccaggttcaaatcataccggtttcgcacgttcacttagactattgcagaaaagtgcaggcggagctgaagcaggcggggataagagccggcattgatgagcgcaatgagaagctcggctataaaatcagagaatcgcaggtgcaaaaaattccgtacgtgctggtgcttggagatcatgaggagcaggagaatgcggtaaacgtccgccgattcggacatcagcagaatgaacacgttcctttccaaacttttaaagataaacttgtgaaacaggtggaaaatcgaggcatgtaggataaaagctgtgaattcacattttgcttttttgactttccctattcggaatcagtaaaataataagtaaatcatatcgttcgtatgttatgaatgcatctcgaaatggggaaattgacatggaccatgacaaactggaagcaaatttgctggatcacgcacttacaaagtatttgaaaagcacgaagcaattagatgaagccaccgttccgaaacacgtgaataatgtaagagggtttattctgcggatcatatacagacatgggagctgcaccataaaggatattttgaaggaggtcacactgtctccctctgccacgaccacagctctgaatcatttagagcaggaagggtttattgagagatccagaaataacaatgaccgccgcactgtatggattactctttctgaatcgggccggggagcggctgaacaaatgatcgaaaaccgccagcagctgattgatggcatgtttgaacgtttaacagccgaagagaaaaagacgttcttggcgattattgcgaagctggctcaatagggataataaaagccggtgcgcgaagcgccggctttatagagattattccatatcgctcaggcgtttgcctgcgacggcataatggtcttttctcatttcttctataaagacaacaattttttcttcagaagcaccggttgtttcctttacggcttctgttactttctcgacaagattgcgtttttgctcgtctgtacggccttcgagcattttgacagttacgtatggcatgggtgctgaatcctcctttatctcgtttcctctctttagaaaaagaggcttcttatagtatactgaataaagtaaattcttgcattttgagaaagagggatatctcacttggaccgttttttatattatccgttatctttaatgccatacctcgtcatcacgctaattgtgtcgtttacgatgcacgagcttgcccacgcttatgtcgcatacaaattcggtgacgatacggcgaaaaaacaaggaagactgacgctgaatcccattaaacaccttgatccgttcggaaccattttgattctggtggccggattcgggtgggcgcgccccattcccgtgaatcgccgtttctttaagaaaccccggcttgctggtgtgctcgtatctatagccgggcccgtcagtaacctgattcttgcgtttattggtttctttttgttagtgttgatgcatgcgtacggaatggaaatgcttgcggcgttcagcacggggctggatcagtttttttctatttggatacagctgaatcttgtcttgtttttatttaatctgctgccgcttcctccgctcgatggctatcgaattatagaagatctcgttccgccgggcgtgcgtgccaaaatgacgcaggcggagagctacggctttatcgtatttttggtgctgtttgtgacaccgctaggatcttacgtgctgtggccgatgctcaatgcaggaagagattcgattttaaagctgttttcagcgatatttcaaccgcttttgtaggaggtagaacttcatggaagaaaaaaagaaaaaatcaatcgggtttaatattatcaaaagtgatccgacagacggacacggcggttttggcgtaggggcactcagccttgataacatttctcccgtattcgttgatgtagaggaaaaagaagcgttcgtagacatcggcgctatgcatgcccgcagcaccgttgaaaaaggaattaaatttctcccgaataaagaagaagtgccgaacggaaaaccatactggcttgtgtgggtaacgattgacagaaaagaagaggggccttattacgctggtgtgacagcctgtgaaatgacggtcgacagaagcatcagaagaggctacaagtcactgcctgagcatgtgaatctgatggataaatccatgaaacggaaaatcatcgttgataaaatggacgacagctcgaagcgtgtactaggcgaatttctgaaaaagcatgatcagggcctatgggaccgttcctcagatgagttaaaaacgagcctgcttccagaaaacaattaatttatgaattttttgtgaacttttaaagtatttgagatatttttcgtaaacattgagtaaactggtgatacagaaataggacatggaaaatcccgagccgaaacaagactcggggtttttcatttttagggggatatgagtcggcgactgggagatgaaagccagcgccgaagaaatgagaaattcaccactttatcccaaaactgattgttcagctcgattgtctaacattcttccatcgattatgaaggaaccatacgaataacccggcctccgaggagccgggttattttcaatgatgtcgccccagccatttgtcccaccactttttctcggaagcgggcttttctttggatggaagccggtcttttgtttgttttgcgggttctgccccgtagcacacgtttgcgggttctgtccctttcacaaaatatgtgtaatgcttagcggcgcagccgggacctgatgagtagcctgtttccggatcaatgtacacaccggttacgccttttggcggcttgaacgcggtttccggttcgcctttgagcgcgtcctccatgaagtccgcccaaatggttttagcatagcttttttcttcgaccgagtcgatggtgctgtttttgtcatagccggtccaaacaccggcggccagcttcggattgaagccgatcatccagctgtctgcgctggtggttcctgattttccggcatacgttcttgtcaggcggttggctatcgttcgccccgtaaccgacgtatatccatttaaatcgatatcaaacatgcctgtcatcatactcgctgtgacaaaagcggctttttcatcaagcacctgtttatgctgattcgggttttcgtacagcacgtggccggctgcgtccgttactcttgaaataaaagtcggttcgattttctttccgccatttgcgagcatggcataggcgttgaccatctcaatcggacgtacgggttcggtgccgagtgccagggacggcagtgcttgaagatgggcggtaatgccgaattcctttgccgtctttacaagtttgttcgtgccgagaaaaagatgcgttttcacagcgtaaatattgtcggaaagcgccagcgcctgcagaagcgtaatcggcttgttggcatagtatccgttatagttgcttggagaataggtttctccctttgcatcaatttgaaactcggtttcttcgcttttcatcaaagtgactggcgtaaatccgctctgaatcgctttatagtacagcaacggcttgatcgtcgaagcaggctggcgcttcgcctgtgtcgtccggtcaaacgggcttttttgataatccctgccgccgacaagggcgagaacgtttccggtgcggggatcaatggctgaaaacccgacttgaatgtcagagcccgcgttaaccgtttcggtaatggtctcctcggcgatgcgctgcatccgtttatctaccgttgtatagacgtttaacccgctcgtttcaatttgctcccgtgtcatgccgagctttttttccagctctctcatcgcattgtcgtagaaataaggagcctttctcttggaaacttgtttattcaaaggctgataggaaagaggttccttgatcaattcatccgctttcttttggctgatcatctgctgcttttccatcatccgcacaatcgttttctggcgttccttggccttcgtctcattgacatacggtgaatagccggaagggcctttcgggattcctgccaaaagcgccgcctccgcatccgtcaggtttttggcatgcttgccgaaatacaggcgggaagctgcttcaatgccgtaggcgccgtggccgtagtaaatcgtatttaaatagccttctaatatctcgtccttagaatagttttgttccagacggatcgtgtagaacgcctcattccatttccgtttccacgttttgtcgtgttcaaggtataagtttctcgcatattgctgggtgatggtgcttgcaccctgaaccttggcaaatgctttcaggtcagcaagcgccgcgccggccatgcgtttataatcaaagccgtgatgatcgtagaaattctggtcttcaatcgccactgtcgcttttacgatcgtcggattcatgtcctttaaggggacccaatagcgcttttcgccgtagttcgtttccccgagctttgagccgtcactcgcgtacaaaatcgtggattgcggcacttgcaccgagggagcgccctggtatttggctatcaaaatgacagtcataaacacagcagctgccgccaaggccgcaaaagcccctaaaaagataaaggcgcgaacggttttcagcgtcagtctcagccgtttatttgtcattgcatccacaacgggttccccctttttttatgtttctactattatgagaaaaaaagatcgtttttaaacatcgcagaacaggacgcatctttactttttccccgccatcctctatactttttccttaggtgaaaatgagatttcaaccgagaataaaagctgataagacgcttacaataaatgaatacagcctcgaaagggagatgacaattgagcgaactttggtacacagagaagcagacgaaaaactttggcattacgatgaaggttaacaagacgttacatacagaacaaacggagtttcagcatttagaaatggtggaaacagaagagttcggcaacatgctttttttggacggcatggtgatgacatctgaaaaagacgaattcgtttatcacgaaatggtggcgcatgtcccattattcacgcacccaaatccggagcacgttctcgtagtcggcggcggtgacggcggcgttatcagagaaatcctgaagcacccaagcgtgaaaaaagcgacacttgtagatattgacggcaaggttatcgaatactctaaaaagttccttccttctatcgcaggcaaactggatgatccgcgcgttgacgtgcaggtagatgacggatttatgcacattgcaaaatctgaaaatcaatatgacgtcatcatggtagattcgactgaaccagtcggaccggctgtaaacctgtttacaaaaggattctacgcaggaatcgcaaaagcgctgaaagaagacggtattttcgttgcgcagacggacaacccatggtttacaccggaattaatcacaaatgtacagcgcgacgtgaaggaaatcttcccgattacgaagctgtatacggcgaacattccgacatatccaagcggtttgtggacatttacaattggctcgaaaaaatatgatccgcttgcagtggaagacagccgtttcttcgatattgagacgaaatattacacaaaagatattcataaagcggcgtttgttctgccgaaatttgtgagtgacctgattaaataatgaaggtatggcgcaggagcgaatcttgcgcttttttacaggaaagcgagggtattatagatgagatttgatgaagcttattcaggaaaagtatttatcgcgagccgtcccgagtgggaagaggcggacgccattctttacggcatgccgatggactggacagtcagctatcgcccgggctcacgctttggtccaagcagaatccgtgaggtgtcaatcggccttgaggaatacagcccatatttagaccgcgatctggctgacttgaacttctttgacgctggcgacattccgctgccgttcggaaatccgcagcgaagcctggatatgattgaagagtacgtggacagcattttagaaaaagggaagttcccaatgggtatgggcggggagcacctcgtgtcatggcctgtcattaaagcgatgtacaagaaatacccagaccttgcgattatccattttgacgcacatacagatcttcgtgttgattatgagggagaaccgctttctcactccacgccgatccgtaaggcggcagaattgatcggaccgcacaatgtgtattcattcggaatccgttccggcatgaaagaagagtttgaatgggcgaaggaaaacggcatgcacatctcaaaatttgaagtgcttgaaccgctgaaagaggtgcttccgaagctggcgggccgtccggtttatgtcacaattgacattgacgtattagaccctgcacacgcaccgggtacaggaacggttgacgccggcggcatcacgtctaaagaactgcttgcatcggtccatgaaattgcgcgttcagaggtaaacgtaaagggcgctgatttagtggaagtcgcgccggtatacgaccactcagagcaaacggcaaacacagccagcaaaatcatccgtgaaatgctgcttgggtttgtgaaataagtaaacatccagacgatgtctggatgtttttttattcccagtctttacaaacatcaatccacacttttgagaaagaaaattcggataattctttcggtgttaattcaatagcggagtttctgctgccgcatgcggggaaaacagtctgaaaccgtttcagcgatacatcaagataaacctcaggatcatgagccaatccaaatgggcaaactcctccaatttcatggcctgtctgctccagcacctcattaggagagagcattcttgctttaaagccaaatgtttgcctggactttttgttgtcgatcttggcatcgccggctgccacaatcagaatcacctgatctccttcccctctgaaggacagggacttggcgattctagacaggcttacgccgattgtctcagctgcctgttcaactgtcgcactcgacgtttcgaactccgtcacatcattttctcgattccattgagtaaagtgggttctcacactttttagagacatgctgcatttccactctcttcaagattattgaaaagatcatagcatggattgggagactttggtaaagaggggacgaaaaaaccgccgatggacggcggttaaatcattcctcgttgtgcaacttcaatttggtgtgtaggtgcatttgcaatagttgttgccacgaacacagtgcttagagccagacaagagagtaatagtttagacttcaatttcatacaaactcactcctccttgaataagttgccttacttgttccaccttcaaaaaataagcagaagctttttgaaaatttttacgttcatgataatattttgccacatcaatagcgaaatcttcaagatcagcatacaacattttactttcgagaaaatcaaaaaatccttgaattgcttcttcatccgggcctgataagtataaagatttcaaaaattcaaactctgataaatatattacatctccggccttttgtgaataagccattcccttactatgatattcatgagctttatctatttttcctaatttataatggatctgtgtaattaaaaaatacgcttgaggtaaggaaggaagaatatttgattcttcaaaaacagctattgctcttttgaaataaggtatggcatcctcatattggctttggctgtttttacaaagcccgatattgtacaaagttctccccattaattggggctgcttttcagcttctgccatagaataagctttttgaaaatgtgagatggcatcctcatactgttttaaatctaaaaaattggtggcaaataaagaatgacactgcagcaatcttatattataagcttcatgttctttgtatatttcatatgcttgccgtgcatagtccattgaaaaatacgtttgtttcatatagtaataagattcagacatcttaaagaaaaactcagctttctctatccgatccttaacgaatatcagcttgctttcggcctttttgaaaaatttaatagccgacagatattcccgctggtccagctcgtacatgcctctgaagaagttaaaatagtactcaagcagaccagttaaacgagcctgttttttatcaatctcaagcagcagatcagacagtctcggctgttcctcaatcctcattttttctaacggttcaaggtactcaagcattaggttgtgccgaaactccatcagtgaatagtacaaatgaaggtcttgatcttcttccatttgatccagctcttgcttgatttctcgtcgcaaatattctgcatcgggtatgctgaatcggcgtatgtacatataccattcgttaatcttttctccgatggaagaagaagatatgacacctgtcacgtttgcaaatccctcccttcataattctatatatgtcatattttatcatcaacattcttgtgagaagcgcaaaaaaaccgcaattttttctttcgttacaccgcatgtttggagatatattttcaaaaagaagcgtttaccctcagcaatttgtacaagcaaacacgttacccttccatattctgttatatctgcgtgagcagtgtatgtctgaaaaggaagtgaaggaatgagaaaaaacaagctttcctttaaagaaaaagcaggagcagaacaagaagagtgcttatgtttttgtgagggagaagcaagccgagaagccatgtttcaagcaccgattgaattacctgaagggtttgtcgttgatccggctgaagctgttgcaaacgtgacgtggaatgcagacagcctttcttgtgtcagtgaccgttgcttaattcaaacggggcctgagcctgatgaggtcggtgttcaatttgcagtgcgcctgcagggaaccgttacgctactcgtcagtgtctcacctgtccgaaatcaatatggacaaggggacggggctgtttccgtcattcacaatgcagaaatcgatcaagtcgtctattattccgatgaatcggatgattgcccggatatcagtgacatcacgattgagaaccttgttgttgttccgccgttttacggcagtcctttatcggtgacggggacaattgtgcttgtaccggagccggaacccgtctacgcgtttacagcgaatccaaatgatcaatcagtttctgtgattgatacaaacaccgatactgttgtgacaacgattgctcttccgtacaatccggcaggtattgaaattacgccagataaaagcgctgtgtttgtcttacatcccaacaataatgtgatttctgtcatcgattatgacacattaacagtgacagcaactatattgctggatcagccgcctcgattgattagatttatccctaatcatgagtttgcttatgttttcaccggtactgcggtttatgtgattggaattgatacgttaactgtggataggtcgattcctgtggaaggatatgatgttgcaatcgatcccaatgggttattcgcctatgttctgaattttggaatagtgcaaaaagtggacctaactaccggtgaagtcacaggaacaattgaacgagagcttatcgtatcaaccatagaaacaaattggccggagcggtatgcctatgtattagaacaagaattcttttttaattatttgacggttattgatttaaatacgtttaccatcagcagcacccaagagctggagtatgaaggggaatatcgaatgtttacgagtggagcagaggtgtatttatatgacggcttcactggcaatttatattctgtcagtccaaatggagcaggcgttataggaaatgttccgcaatcagcaacagactatgcgtttaccccgaatggcgattttctgtatgcaactcgttttatagagcagagcatcattgtttacaacacagatgattattctgaggaaactgtgatatctcttggggtttcaccgggtgccattacgatttaaccgctgcatgttgtgcatttctaaaaggacgtgaaatcatgaaaaagaatgatctttctgctttacaggaaaattgtttctgtttttgtgatgaggaaattagccgggaagcgccgtttcaagtgccgatagatttccctgagggcttcaaggttgatacggccgaagcgtcagcggctgttacatggagtacagacaatttgtcctgtatcagtgagccttgcttaatccagactgggccggaaccagaagatatcggtgttcgatatgctgtgagagtacaagggaccattacgcttcttgtcagtgtgtcgcctgtacgaaatcaatatggacaaggagacggggctgtttctgtgattcatactgaagagattgatcaagttgtttattatgcagcacagtctggccgctgtcctgatttcagtcaaataacagtggaagatctgctcattgtaccgcctttctacggcagtccgcttacggtggccgggacacttgttttaccgccatcaccagaccctcaatcgtatgtgtttactgccaatactggagacagcacggtttcggttattgatgcagatttaaacactgttgtaaaaacaatccctttttctgacgtgccaactaatctaggcgttactttcgataaagcattcacgtatgtcctccatggaaataccaaccttgtctcagtgattgataataaaacattaaccatcataaataccattactgttggaggagggccgagaaaaatcgaatttgatccaacagatgagttcgcatacgtgatggccgccggatctatatatgtgattaacacggcctctcaatcggtcattgatgtcattccgatacccggcgctttagactttgctcttgatccgaatggacagtatgtctataccgctaatggaagcagttggtcggttgataaatatgatgtaaatactgggcagttggtagaaagtatcatagatacatttgaatttcccagtttaattacaactccttacgctggaaattttgcgtacgtattgaatggtgagctgtggccgaaaggtgtaacggagattagtttgtcaccattaagcaggggaggggacttcagccgtttatttgaaacgctgaggacgattgtattttctctcgatagtactagagcttattttctagagccatatagtgaaccgtttctcattaataacttatacgtagttaatacggccagacagaggatcattgcaaacgtgtctctccccggcgcctttgacctcgccgtaacgccggacaaacagtatatttatgcggcacagcccaacgacaatgctgtgaccgtgtaccgcacaagtgattatacagccgtgacggtgattccggttggcgcgggtccgtctgcgattgcgatgtagctattttatagatcaagagaagcggtgctgtgataagagaatcgtttataaataaatgatccgatttgctgaatggcagccaggataatcagaaacagcagttcacttatagagaaactgagcatccaccaaatcccggctgctgccagtgctcccgcaaacacttttctgaacaggctgccgtgccggaaaagctgccgcaaatacgttcgcatgcaaaacaataaatacaggatcagtagcatcgcaagtcccattgaaaaggcagggggcgtatgaaggcggaaagggacggctttaacgatttcgaacatgcagccgaatatgatgacttggcacaacacggcagccatcacgtatgtttggcggacgtttttatagctgtcacgcagcgatttgacgtcttctgcatatcggctgcacaagttgtgttgctgaaagtcacagcagctttgatgagactgtgtgagtttctgaaaagctgctgtcatgtttttcacggattgggtgacatagtgaagatagagaaaagcaggcagcatcaggagggcagcggtacaagccagcagtccgagccgcacagcatcattgttgatcatctgtacatattgggcggcggcttcggcaacggcctgaacccagccgaaggaataagccgccatacctataagcagcaataaaagggtaaagacagtgctttgtttcattgtctgatcgcctctttctgagaaacgtgaatgatcgctttgttagaagatgccattgcatcaatgagagacaagaaaacctgcgcatccatatcttgaatgatgtggtacatgtcaagaaacgagcaatcgcacctgtcacactcggctgcccactcgaagcatttacgcacataatcgctgtcataaatgatcgcgtctgtcaaagagtccttgccgtattgaagccaggcggcaacctgttctttcttctgtgtgacatagtatgaagccacatcgatataagctgaagaatgggtcccttgactgtgaaggatcaagaaaccgccatcctcatatatataagtctcggctgacaagcgatcgatttccaggcggtacgtttgctgaatctcttgaaaaaacggtgaatctaattgaaatagaatacgagccgcgatatcccaataaagctttatcgacaacagatcgttttgcccgggaagtgcgccgatctgtaatccggtccaggtatcttccatccgctcctcatcacccagcatcattttttgtgagaggactggagggcatgccgggatgatttttctttcagcatgataatccggacgcttttccagctggaggtgaggaggcaaaagcgtttctgtattttctgagcccccaatcaaaaacagcgtcatccgatgggcttggtaggcagccttataggctttttgtaaatcactgatgtccagcgcctcaatatcttcgattctgcctgcggggaaaacggcagctggtgaggagggagaaagcatgctgatcagctgataatgatatgagagctgatggttaaggtgtgctgtttgaatttcgcttgtaatcacagctttttcctgagcgacaatcttcttgtcaaatgagtggttccataaagcatcaagcaggatgggaatcgtttgtctgagccgatccggtaatgaggtaaacatgaaattggtatcggtgtaggtagtgaatgcgtttaaaagcgcgccatgcgcaaaaaaatcactgtacagattgcggccgttatgccagaagagaagatgctctaaaaaatgtgctgtgccatacggaagcagtgtatcaccggattctgcccgtatacatacatcccggcttccaaaatcgatttttacattgcacagccgcaggtgggcgcgggggaatttcaatctgaatatttttagtccgctgtctgtgtatctgatatcggttcgttcatccagctgttgaaaaaaggctttcttttccatctcttcatccccttactacatgagctccgatataattgatggtcgctatgaattgcaatacatcacggcatgtaaccgctgagatgccatccagcaaggcttctttcgtgcaggagaagcggcgcaggacccccatataggccaatagaccttcgggagaatcgaattgcagcagcaattcattgcgtaaaaactgctttgcctgttctagttcccgctcatctgtatgaaaagctgagacagcttccaaaacgcgcgggggaatgtctttctcatgaagctgatctgtacatattgaaacaagcagcaaattgttcatgacatcgtaacgggtgataacgtgatagactgccagatccttctctctgaagtgcttgaataaagcggaatggccgtactttcccagtaatccgtctattagctgtattttgatataatcgctggcatctttcatctctccgcagtcaaatccgagtgtcaagacggaaggacctgcagcgctgcgtgtctctgtttcaaaaacatgccggtttacgggtattcttccggacgttacagcggacgtttgcggggcatgtccccgaacatcacatgcttgtacttgtcccaatatgttcagctgtttttgctgggacactaaatcaacgataaagtccgttgcgtcgagaaaccgtttaggatgaatcgcctttatcctgtctctccggccaaacatgcctgtgccgtacatcgggtttccgaagacctcctcagccaagcgagccgccgagtaggagaagggatcagtgaatttcttttcgattttcagcagcagctcattcctggccttttcaaatgcttcgaatgaaagagaagaagggaaagacaagtctgcaaaagttttcatcagggcgtcaacatgaagattcccgttatataatgggtgaatcaaacgggtcccgcaggttttcagctgctgatcaaaaaagagattcgctgagtacatgaaacggctgccggcagcataaccaaaagcgtcaatgatttgctccttcaggtatgcggcggcgccgtaaaaataaatcgtttcttcctcaggttccgccgcgctttcgatcggtttcagaaagctcgcggcgattgaaatagttgaaaattgatgagtcttcagcaggttaacttccaagccgttctcttttgcttgtatcaaagaaaccaccatcctgtttttgcaggtaatagactatgaccagaccggctatcggaatgaccgccaaggatacagcggtgccggctaatatggctaagaataggggaagacaaaacagataagaccgatattttgagaaaccgctccatagctgctgctccgtctgccagctgaaggagggccttttttcatccgcagttaacctgatatacgctcccgccagcagcaactcaatgcactgcaaaaaagtgagaactgaaatcgaacggccgctgatgaaacccacaatcatcacgacaaggagaaatccgcctgccaataggcctgaataaaagcgatatttcgcccaaaacatcgtttttcgcttgatcggaagcgtgatgagcagcatccggtcatttttttcaatcgaatacaaaagggcgatcggcgagcagatgagcaaaagcgcggaaatcacgatataaatcacttgctgattgaagatgccggtgttcatcatctggaacgaaaagaagccgctgaataccgccattaccgcgtaatttaacagcatcgctttagaagagataaatcggttccattctcttttgtaaaacgaaaattcagatcgccgcataaatgaatgcatcttgccctgctgcggaggcgcctgcagaaagacaggaaagtcaatgaccaccgcccacaggatatgaaccgcgcaaagcggaatcgtggcggccggcatcaaagcggcgctgatacatacacaggcgaatatcgccgcatgcagcagaaacatcaagttcttctttttgacgaagtggttgcttagcacaactccgaaaataatggagtaaacggtaaaaaacgaaaacctgccgagccaaaacaatgtttgcgcccctgacagcgttccgtttccaaataagaacagcggtaaaataaaaaagaataaagttcttctcaaacaggtatcgacaaacaaaacgacactctgggcgagccaaaagctccgtgaagaaatcggcagcaggcagctcagcttcatataagattccttccattgtgatgtcacggaaagaaacaccatatatgtgttcatcaaaagaagcgcgagtatgatatacgttttgcgcaacaccgattcatcaatgccggcctggcggatcagcccgatttcaaacacggccagaatgacaaggcctgcggcaatgcggatggcgtcctttttcccttgccggctgtaaagctgtttgaacagcaaagacatgatagggattatgttattcatggccgatcacctcgaaaaattcccgccgcagatcggtctcctctccaatcggaatgaccttttggatctgtttgttgtgaagaatagccgcataatcacaaaatctttgcacgacatcgagcagatgagaagaaaacaaaatggttccgcctgcttcacagtactcacgcattttctgataaaagacctctatcgattccacatccaaaccgacgagcggctcatccaaaataaacaggggagcgcgcagcaataagcctgtcatcaatacaaccttttgcctgttccccaaggacagctccgaaattctcctattgatgtatttcgaaaaatgaaaggcctcggccaaactggcaaactgctgctctgaaaaatccttttgataaagcgaatggacgaaagacacatagtccttcgccgtaatttctgtaaatagcagcggataatcggcggcgaagtaacggtgagtcttcagctgatctgatgttttctgcggcatgccggcctccgcttcaattccgcacagtgtaaaacgcccgctgaaattgcggttcacgcctgtcagcgtattaatcagtgtcgtttttccggcgccgtttaccccaagtaacccgtaaacggcgcctttttctaaatgtaaatccacttgttctaagatgacgttgtcccgttcataccaaacggatacatcgtgtatatccaaaatgctcatcgcgagtcagccttccgcgcgcgcatcccgaacagaatggcaatggcaatgaaaatcagcgtaaacagataatcgcttttgacaaaatagacgactgcgccgatgacaaagataaatgaaaggatatacagtaaaattcttctttgtgctggtgacaaatcgtttccctcctaaataagctggaccacgtcttctaattgttcatttttcgcccaagagcaaatgtttttccggtgatatttgttagagttcagcccttttaagtaacagcctccgcaatagccgctgaacgggcatttgtctttcatgcaatgttcgctgaaccgcggcgcttgcgcttgccacagtttatggacgagaggggagttaaagatgctttcataggaatcatgaaaaatatttcccaatgaaaattcctttggaaagagggcgcaaggacgtacttcgccgaacggactgatcacaatggacttccagccagcgccgcaatttgccgcgcgttttctctcatagggaataatcggaatcagatctttaaactcatcaatcacatgttgctcgtattccataaacttgcggtgctgctcggcgtctttcgttggatggacaatatccctgcctcttccgaaatcgtcaacccaattgtaagaaaacgccttcgccccgagatcccgaaccttttgggccatatcgtggatttcccacatgtttttttcgaagacagacatagcgactctgacaaatataccgtggtcactcaacaattttatcgttttacaagtttgggcaaaagagccttttctccctctaaaggagtcatggacctcggaattgacactatctagagaaatgccgacgatgattttttgcttgtaagtcttcaaaagctccaggctctcttttcgcatgagtgttccgtttgttaagacagcgacttttttgaactttttacacacatagtcaagaatctcattggcgtttggatggacaaaaatttctccacctgtgatttcgcatgtcaatacaccgttatcaaacagcatatcagccgtttttttgaattgctcaatcgacacggtgccgagcgcttcaggtgagctttccaaataacagtgggcgcatttcaaattacagcggtgcgtcagttcaaaggtggcgtgcaggggcatcggaaattcattgcttccgctcgtggtgattgtatggcggctggcccggtttccaagctgaataacctgcttgttctggagcatgttgagcatgtcgtaataccaatctttatggtcttccggtgattcatcatacactgcacattgctcagctaaaatctgctcagctgttttttggccatccatgcgcatgcagagctcgtaagccgttttgttgagatccaaatactcaaagtcagaaatggagacattatcgcgcaagtagtcgatttctaacacgccgccctcaggaagctggtgaactcttacactttcattaataaatggaaacatctgctctataaacaaaataccatcccctatacatatgattcaaatgaaaaacggttgtgtatgtatatccaagaggtagattttagttaaaaattgtaatttacttaaaaagggcatagtagaatgactatgcccttttgggagatccttacccccatagaccgaatagacctgttgcaccggcaatttcaaaatcagggataggaccgtccactagacaagcggctccgatcgagcatgttgcacaacctttgttttctacaatgacagcttttttcataattgaatcctccctttttttgtttttctagcagatctatgttgtacttttatcttaaaactatcaaattactaattcaatacatatattttgaaaaaaatgtgaaaaggaaatgatagatttcggaaaaatgtaacatttcctaaaggtaattagtgatatgattttctcttctatataaggaaatgctttttatgaggtttatcttcaaatctgatgagcaatgatggtaagatagaagcagttgaagtttacaaaccgaatgattatactattcaagtcaaagtggaatgatgaaaaggacgtgtcagaatgaagcaagagacaccgataacactccatgtgaagtctgtgatcgaggatgacggaaaccaagaagtcatcgaattccgcaccaccggattttactatgtaaaacaaaataaagtgtatctatcttattatgaagaacacgacttaggcaaagtcaaaacgattgtgaaagtaagcgaaggcgaagtcctggtcatgaggtcaggcgctgtcaaaatgaatcagcgtttcgtaacgggagcttccacaattgctaaatataaaatgtcatttggtgagcttgagctgaaaacaagcacaaaatcgattcaatctgatctcgatgaagaaaaaggccgtatcagcatcgcatatgacatgcatgtcggagacgagcaggagcatttacataatatgacgatcacgtatgagggaggaactcacgcatgaacattgcggaacaaatgaaggacgtgctgaaagaagaaatcaaagcggccgttctgaaagcgggactggctgaagaaagccagattcccaatgttgttttagaaacaccgaaagataaaacacacggcgactactcaacgaatatggcgatgcagttggcaagagtggcaaaaaaagcgccgcgtcaaatcgctgaagagattgtcgcccattttgataaagggaaggcttcgattgaaaaactggatatcgccggcccgggttttatcaatttctatatgaacaatcaatatttaacaaagctgattccgtctgtactggaagcaggggaagcatacggggaaacgaacatcggaaacggtgaacgagttcaggtagaattcgtatcagcgaatccgacgggagaccttcacctcgggcatgcgcgcggggcggctgtcggcgattccttgtgcaacgtgctttcaaaagcgggttacgatgtaagccgcgaatactacattaacgatgcgggaaaccaaatcaacaatctggcgctttctgttgaagtccgttactttgaagcactcggattggaaaaaccgatgccggaggatggctaccgcggtgaggatatcattgcgatcggaaagcgtctcgctgaggaatacggtgatcgtttcgttaacgaagaggaaagtgaacgcctcgcgtttttccgtgaatacggcctgaaatacgagctggaaaagcttcgcaaggacttggaaaacttccgtgtgccgtttgatgtgtggtattcagaaacttcactgtaccaaaatggaaaaatcgacaaggcgcttgaagcgctccgcgaaaaaggccacgtctatgaagaagacggcgcgacttggttccgttccacgactttcggcgatgataaagaccgcgtattgatcaagaaggacggcacgtacacgtaccttcttcctgatatcgcgtatcataaggacaagcttgaccgcggctttgataagctgatcaacgtttggggcgccgatcaccacggctacatcccgcgtatgaaagcggcaatcgaagcgctgggctatgaaaaaggaacgcttgaagtagaaatcattcagctcgttcacctttacaaaaacggcgagaaaatgaaaatgagcaaacggaccggtaaagccgtaacgatgcgtgacctgattgaagaagtcggcttggatgccgtgcgttacttctttgcaatgcgaagtgcagacacccatatggattttgacttagatcttgctgtatcaacatctaacgaaaaccctgtgtattatgcacaatacgcgcatgcccgtatttgcagcatgcttcgccaaggggaagagcaggggcttaaaccggcggcagatcttgatttcagccatattcaatcagaaaaagaatacgatctgctgaaaacgatcggcggcttcccagaggcagtggcggaagcagcggaaaaacgaattccgcaccgtgtcactaactatatttatgatctggcttctgctctgcacagcttctacaacgcagagaaagtcatcgaccctgaaaatgaagagaaaagccgcgcgcgcctggctttaatgaaggcaacgcaaattacgctgaacaatgcgcttcagctgatcggcgtatcggctccggaaaaaatgtaatcacgatcaaaaggacaaagtcttcgggctttgtcctttttttatgagaaaaacgtgtgatgtaattcacaatcctgtttggctagtttttgtatgataagactgattattgaatcattgaaaggggcaagccaaatgatcaaccgtcaacacattcaattatcgttacagtcattaagcttggtggcagggtttatggtttgggtgctgatttcatcactcatttcccaaatcacattagatattcatttaagcaagggtgagatttctttagtgaccgcgattcctgtgatcctcgggtcgcttctccgcattcctttagggtatttaacgaacaggtttggcgcgcggctcatgtttatggtcagcttcatcctgcttttatttcctgtattttggatcagtatcgcggattctctgtttgatttaatcgcaggcggctttttcttagggatcgggggagcggtgttttccattggggtgacctccctcccgaaatattatccgaaagaaaagcacggtgtcgtcaatgggatttacggtgcaggaaatatcgggacagccgttacgacatttgcagcgccggttatcgctcaagccgtcgggtggaaatcaaccgtgcaaatgtatctgattttgctggctgtctttgccttactgcacgtattgtttggcgacaggcatgagaagaaggtcaaagtttctgttaagactcaaatcaaagctgtttaccgaaatcatgtgctatggtttctgagcctgttttattttattacgttcggtgcctttgtcgccttcactatctatctgccgaactttctggtggagcattttgggctgaatcctgcagatgccggcttgcggacggctggctttattgcggtttctacgctgctcaggcctgcgggcggattcctggctgataaaatgagcccgctccgcatcttgatgtttgtttttgccgggcttacattatcaggcattatcctatcgttctcgccgacaatcggcctttatacgtttggatcattaaccgtggccgtctgctcaggcataggaaacggaactgtttttaaactggtgcctttctatttttcgaagcaagcggggattgccaatgggattgtgtctgccatgggcggtttaggcggcttttttcctccgctcatattggcgagtgtatttcaggcaacaggccagtacgcgatcgggtttatggcgctttcagaggtggcgttagccagttttgtccttgtcatatggatgtattggcaggaaagaatgaaaacacacacggagagaaacagccagagcatcaactaacactggggcattcacaagattgttagttttttctcgatgggtacaaatcaattcacgttacaataaacacacaacgtgactttcttcgaggtgagctcatgaattttctctctgttcgaccatctgatagtgatcttatatccagcgatctgtatgaattgctggaatcgatcagcacgaaaagaaaaatggaaaaacacacgtatttgtttcgggaaggaatggatgcagaagagctttatctgattcaatcaggactcattgaaatcggcaagctgacatctgacggaaaagacctgacgcttagaatctgccaaaagcatgatatcgtcggagaattaacacttttcactgaagaaccaaggtatatgctcagtgcaaaagtactagaggatggcgaggtgctcgtcattaataaaaataagctggaaaaagaattaatccaaaacggcgctttgacatttgagttcatgaaatggatgagcacgcacctccggaagattcagtccaaaatcagggatctgcttcttcatggcaaaaagggggcgctctattctacccttatccgcttatcaaacagctacggagtggagcgaagcgacggcattctgattaacattgtcctgacaaatcaggatttggcaaagttttgcgcggctgcacgggaaagcgtcaatcgtatgctcggagatctccgcaaaaaaggggttatttcgatagacgaatccggaaaaattattttgcacaagcgggactatttacgatgtgagattgagtgtgaaaattgcccgctggagatttgcaatattgactgaaaaaaacaaggacagcggtgtccttgtttttttaccttgtgataaacaggcacatgacggcaagaaagaagcaggcattcacgatttccagaatgccaatcgtttttacgggccaatcccttccatgaaaaaaccatgcccgcaagctgctcgggataaaagcgagaaacgcccatcctgctccgaaaagagcggataaaaaggggagcagcaggtgatatccccatgaccagtatgcaaatgccctgttttttctctcgcggatcaccgatttcacataaaaggaactcccgataaaaaataaagcagactgcaagaaaataaaccaagcccagccgtcaagggttcccatccccagccagcagctcgcaaacccgcccgaacaaaagaacaagacacctgcaacatcattcaataaggctcgttcgttttttctgcgggcaaaatacatatgtatgagaaacagcggcagtaaagaaacgcccacccagatgagaggcggcttatgaaagaccgagatcatcaaaaagcagcaggtgggaaaaccgtaataacacatccacttttgatatggtttgctttgtttcttttttaaggcaagcgtaacgggataaaccgctaagtataggaaaagccaaccaaggaagagcggaatatgccaaataacggggcctcccttgaccatgccgagtaaaaatgggatcagcagcatcgcccacgccccgtgctgcttcggaatcagcgccttcatcgaaatcctccttttttctttcattataaatgcattcaccctcctgataagtgacattcatcatacaggctgtgaaatacatcactgctgtacaggctcagtcgagctacactaaagctatccttagcacaggaggttttcctatgaatcagtgtgactatttattatttctgaaacaacttcctatgtttaatgaagtgcctctatccattgtcgaaaccttgctgaaaaacggcacgtttatccgcggttcatgtgatcagtctccatcttttcttcattctcaatctgtttatattgtattaaaaggcagtgtccgttttatggacacaaggctccctgaagggtcgaaaaccgttgcgctgtgggaaaaaggcgatgtgtttccgattgatgaaaaaggcgggctttatttatcgccctttatctcagtcaatgccacttcagacattctgattctcaacatcccatattacatatttaagaaaatgatgtcttatcatccgcagctgcaaatgaactttttggctatgcttcagcaaaatgttttttgttcctatcaattatttttgcggtatctgcatacatcacaggatgaaaacgctgagcccggttcttaaatagagccggttttttttgatctttgaatgaaaggcagctaatgacccaagcgtcctgcctgaacgcagccttccttctcctttgtgtgaacattttgtgaaaaaagcagagtgtgtgacatagttcacaaggaaacacgctgtctctgtttatagtgaacttagcatcacctgactcggaaggagtgaactctcatgaagaaaaagaaaaggagtccgttgtttaggagattgaattatttctctcctatcgaacaccattcaaataaacatagccaaactacccgcgaggatcgcgattgggagaatgtatacagaaacagatggcagtacgacaaagtcgttcgctccacccacggcgtcaactgtacagggtcttgcagctggaatatttatgtgaaaaacggaatagtcacgtgggaagggcaaaatttgaattatccatcaacaggcccggatatgcctgattttgaaccgagaggctgcccgcggggggccagtttttcatggtatatctacagcccgctccgtgtgaaatatccatacgtgcgcggtgtgctgatcaatttgtggcgggaggcattgcagacgcatcaaaatccattggaagcctggaaatcgatcgtcgaaaaccctgaaaaagcgaagtcctataaacaggcgagagggaaaggcggttttgtgcgcgctgaatggccggaggtgctgaagctgatttcagcctctctgctgtatacagtgatgaaatacgggcctgaccgaaacgtcggtttttctccgattccggccatgtccatgatcagccacgcatcaggctcccggtttatgtcgttaatcggaggccctatgctcagtttttatgactggtatgcggatcttcctccagcatccccgcaaatttggggtgaccagacggacgttccggaaagcagtgattggtacaattccggctatattatcacatggggctccaacgttccgttaacgagaacgcctgacgcgcattttttggcggaggcccgctataaaggcgctaaggtcatttcgatcagtccagattttgcggaatcctcaaagttcgcggatgactggctgagtattcgccaagggactgacggggcgcttgcgatggcgatgggtcacgttattctgcaggaattttacgtgaaccaagaaactgaacgttttattgagtacgcgaagcaatacactgattttccatttctcgtcactctgtcaaaagaaaatggcgtatacacagcgggacggtttctgcatgcgaaggacatcgggcggaagacaaagcatgatcagtggaagcctgcggtttgggatgaacagacaagttcatttgccataccccaagggacaatgggctcgcgctgggacgggcagcagaaatggaacctgcacatgattgatgaagaaaccggggaaccgattgaaccccgtctctctgtgctgggaatagaggacgaaatcggcacggtgcgcatcccgtatttttcaaatgacggaaacaaagtgctcgagcgggatcttcctattaaaaaaatgaacctgaacggtgaagaaacgtacatcacgaccgtgtttgacttgatactggctaactacggcgtgaaccggggcatcggcgaacgatcggctgtctcctatgatgaccctgagccgtttacgcctgcctggcaggaacaaatgacaggaatcaaaaaagaagctgtcgttaagattgccagagagtttgcccaaaatgcgatcgatacagacggccggtccatgattatcgtaggggccggcattaaccactggttcaactccgacacgatctaccgagcagtgttaaatcttgttttacttgtaggcgcccaaggcgtaaacggcggaggctgggcccattacgtggggcaggaaaagctccgacctgctgaagggtggcagacgattgcaactgcaaaggactgggaaggcgtgcccaagctgcaaaatggcacctcatttttctactttgcgacagatcagtggcgttatgaggaccagccgatcagtgatttggcatcaccgattgctgcttcatcccgctacaagcaccacgctgattacaatgtgctggcggcgcggctagggtggcttccgtcttacccgactttcaatcaaaatggcatcgatctgtataaagaagctgaaaaagcaggggcagcaacacctgaagacgtaggtgcgtacgtggcctcacagctccaagagaaaaaactgaaattcgcgattgaagatcctgacaatgaagtgaatttcccaaggaatctctttgtatggcgggcaaatctgatctcaagctcaggaaaagggcatgaatattttctcaagcatttgctggggacaacgaacggtttaatgaatgacgacagcgacagcatccgcccagaagaaatcaaatggcgggagcaggcgccggaaggaaagctcgacttattaatcaatcttgattttcgaatggcgggtacggcgctgtattccgatatcgtgctgccggcggcgacatggtatgaaaaacacgatctcagcagcacagatatgcatccgttcattcatccatttgctcctgcgatctcggctccgtgggaatcgaagtcagactgggatattttcaaggcgctgtcaaaagccgtttccgatctggcagaagaagtcgatatggagccggtgaaagaagtggttgcgacaccgctgctccacgacaccatgcaggaattggcccagccattcggcaaaatcaatgactggagcaaaggcgaatgtgaagccattccgggaaaaacgatgccgaacatccaagtcgttgaacgggattacaaacacatttttcataaaatgactgcacttggtccgaacgttgctttaaagccgagcggaacaaaagggatgagctggtcaatagccgatgaatatgaatcactcaaacagagactgggagaaatcacctcggacagcgtggcaaagggatgtccaaatataagtgaagcaaagcaggctgcagaagcgattttaaccctatcatccacttcgaatggaaaggtcgcagtaaaagcatgggaatcacttgaaaacatcacgaacctgaagctgaaagacctggcggaagaacgcgaggaagaatgctttacgttcgaacaaattacagcccagccgaaaacggtgatcacgtctccagcgtttaccggctctgaaaaaggagggcgcaggtattcgccgtttacaacgaatgttgaaaaattaattccgtggcggacgctgacaggcagacaatcctattatgtcgatcatgaactgatgatggaattcggtgaaacgatggcgacattcaaaccgatcctccagcatcgcccgtttctgagcaaacggcctgatcaagagggaaaagaaatcgtcctcaattatttgacgccgcataataaatggtctgtccacagcatgtattttgattctctgccgatgctgacgctgttccgcggcgggccgaccgtgtggatgaataaagatgatgcagaggacacggatatcaaagacaacgattggattgaatgcttcaaccgaaacggcgttgtcgtcgcgagagccgttttgtctcatcggattcctaaaggaatggcgtttatgcaccatgcccaggaccgccacatcaacgtgcccggcacaaagctgacgaataaccgcggaggcacccataacagcccgacaaggattcacgtcaagccgacacagatgatcggtggctacgcccagctcagctacggctttaattattacggtccaacggggaatcagcgcgacctgaacgtcgtcatccgcaagctgaaggaggtcgattggcttgaagattaaagcgcaaatcggtatggtcatgaacttggataaatgcatcggctgccacacgtgcagcgtcacctgcaaaaacacgtggacaaaccgttccggtgcggaatatatgtacttcaataatgtagaaacaaagccgggcatcggctacccgaagcaatgggaggaccaggacaaatataaaggcggctggacattgaaaaaaggaaagctcgagctgaaatcgggctcgaaaaccaatcggcttgcaggccttttctataatccgaatcagccgtcaattgatgattactatgaaccttggaactatgattatgaaacattaacgaacagcccgcagaaaaaacaccagccggtagcacgcccgaaatcgtccttgacgggggatttcatgaatatcgaatggggaccgaactgggaggacgatctcgcaggcggccacattacgggacttgaagatcccaacgtacaaaagatggaggaatcgatcaaaacagaattcgatgacgtctttatgatgtatttgccccgtatttgcgagcactgcatcaacccggcatgcgtctcatcctgtccatccggcgccatgtacaaacgcgaggaggacggcattgtgcttgtggatcaaaacgcatgccgttcatggagatattgcgtctcatcctgtccttataaaaaagtctattttaactggcaaacgaacaaagcggaaaaatgcacactctgctttccgcgtttggaggcgggactgccaaccatctgctctgagacgtgtgttggcagaatccgctacctcggcgtcatgctatatgacgcggacaaagtggaggaagcggcatctgttgaaaatgaaaaggatctctaccattcccaattggacgtttttcttgatccgaatgatcctgaggttgccaaactggcaaaagaacaaggcattccggctgaatggatagaggccgcgcagcaatcaccgatctataaaatgatcattgactggaagatcgcgctgccgcttcatcctgagtaccgcacgctgccaatggtgtggtacattccgccgctcagcccgattatgaatctctttgaaggaaaaggcagccggcaaacggcggaagatatttttccggctatcgaccaaatgagaatcccgatagattatttggcgcagctgttaacagccggtgatacggatcatattcggtcaacattaaagaaaatgtctgtcatgcgccagtatatgagagcggtccagacgaataaatcaatcgatccggaactgatctccagtgtcggcttaacagaacagcaaattgaagatatgtatcggctgcttgcgattgccaaatatgatgaccgctttgtgattccgagcagccatcgagaagaagtatcagatttatacgctgaacaaggaagctgcggcttatcattttcaggcggccccggctcctgtttctaacttttgataaatgaggtgtaacaagatgaacaccacagaccggcaaatcacgttctctgctctttcctgtcttctctcttatccggatgaagagtggagagccgagcttcccgattggaaggctcttatccaagaaatcggcaaccggcaaatccgggagaagctgctgcactttttcgagacgtcagccagctattctccggaagcgctgattgaacactatgtctatacattcgacttcgggaaaaaaacaaatatgtatgtcacctactttaactcaggcgagcaaagggaacgcggcattgaattgctgcatttaaaaaacacatacgagcaatccggtttcctgccgacagagaaagagctgcctgattatctgccgctgatgctggaatttgctgcggctgcagaaattgaagcagcgagaagcgtgtttgagaaatatctgtccaatgtgagggagctggcatcccgtctcgaaaaaaatgacagtatatacgctgaactgctgcacgtgctgctggccgcgcttgaaaacattggcgtacgtgaaagcgttgaaggggctgttcaggcatgagcgggcagatcctctggggtattatgccatacattgtattgacaatctttatcggcggccatatttaccgctatcagcatgaccaatttggctggacggcgaaatcaagcgagctgttagaaaagaaaaaacttgcggctggcagcacactttttcactggggactgctgtgcgttgtcggcgggcatgtcatggggattctgatcccagaaggcgtgtatgcttcccttggcatttcagagcatatgtatcacaaaatggcgattggcgctggcttgccggcgggcattgcggcatgtaccggacttgtcatcctgacgtacagaaggctgtttgacaaaagaatccgcaaaacgagctcgccatccgatatccttacgctcctcctgctgctgttcatgatgctgtcaggcgttgcggccacgtttctcaacattgattcgaaaggatttgattaccggaccacagtcgggccctggttcagggaaatcgttttgttcaggcctgacgcctctttgatggagagtgtcccgctatggtttaagtttcatattgtgataggatacgtcgtttttatcctgtggccgtttacgagattggttcatgtgttcagtctgccgctcaagtatctgacccgcagctacgttgtatatcggaaacgctcgtgaaaatcccccttgcaagagggggttttttctgccaaggtaatggctgggctgccgggaatcctgttatgtttgtatatggaaataacatcaaggattttactcattttaaaccggcggaacagccagattatgattcagcctgactaactccttatatctttctgatcaatttcccgttttatatattttctctcatcagaatgggtatcaaatttactctatccaccgtatttgcagtcacagcgccgccttcttttcggcgcttgccggagtgctgagcgggttcagcttgccgctcatgttgtcactcggcgttgccaatagtcttgctttatttctgcagaaacgatgcggatgaattccgtgacagttagttttctctaaacctctcctcctttggcggagaggttttttacttacaaggtttatcgattagaaaaaagaggtaatacagaggtaattgaatcagattggagagaatcaggatgctgaaaaggagactggaatttttctttttatatatgatgctcatcggggcatatgtcatttggttttttccggtttccagacttgagttttacggaggattgctttgctatataagcattattttgttcagcatctattcattaattcttgaaaaccgcacctcgcagcacacgctgctatggatccatattcttgtcttttttccaatcgtcggctacgtgttttatctgttttcgggacagctttatgtaaagggaaagctgtttaagacaaaacgaatgtacaacagggaaaagctcaggaagctgtttgacaaggaggaaacgcccgaagtgacagggctgaaggacaatcaagagaggttctttacatattccatcagggctgcccatatgaatatcaatacgaaaagcaacatcaaagtgctgaaaaacggcgaagaaaccttcccggacattttcaaagcaatgagaaaagcggaatcttacatacatattgaatactacatgtttaaatcagacatgctcggacgcggcatgatggatattatgatggagaaagcgcgccagggtgtcgaggtgaggtttttatacgatgcggcaggaagcatgaagctggcaagaagagatattatgagaatgaaacaagcgggggtggacatcgtcccgttttctccgctgaaatacgggtttttcaaccagaagctgaatttcagaaatcaccggaaaatcgtgatcatcgatgggaaaaccggttttgtgggtggattaaatgtcgggaaggaatatatcagcagagatccgtacatcggattttggagagatacacacctgcggcttgagggggaaattgtgcaaacgctccacgctatctttatgctggattgggaatatgtctccaatgaagtgctaattgatcaagaggagtacaataccccggttcccgtggaaggaggaggcatttatcaaattgtcgcgacaggccctgacatgaaggaaagcatgagcgacctttattatgaaatgatttcttcagcgcagaaatcaatatggatcgccacgccctattttgtccccaatgaatccattcgcacggcgctaaaagcagcggcgacaaagggggtagaggtaagggttatggtgccggagaagaacgacagctttttgacccaatacgcgtcgaggtcctatttcccggagctgctccttgagggcattgaagtgtactcctaccaaaaaggcttcatgcatcaaaaagtcatgatcattgatggcgatctcgcctccgtcggtaccgcgaatatggacatgcgcagctttcagctcaactttgaagtgaatgtgttcttcacggatgccgaagcgatccgaacccttgaggcccattttgaagaggatatgcaggaaagtgaaaagctcagccctgtcggcttttataaaagaggtgtggctgaccggacaaaagagtcgtttgcccgcctgttttcaggtgttctgtaagaaaaaagaaatctgatcttacaaaacagcccgtgtatagtataattgagaaatattatcagttatttatacattgggggaagatagggtgctgcggcaatttttttcatattataaaccatataaaacgttgttctttctcgactttttctcagcgatcgcgggaggtttaatggagctgagttttcctttgatcgtcaattattttattgataccttgctgccgggcagggactggggactgatcatcgcgacctcaatcgggttatttgcggtgtacgcgctcagctcggctcttcagtatatcgtgacctactggggacacatgcttggtatcaatattgagactgatatgagaaagtcgctttttgaccatttgcaaaagctctcgttcaaattttacgacaacaacaagacgggaacgctgatgtcgaagctcacgaacgatttaatgtatatcggtgaagtcgcccatcacggaccggaagacttattcattgcggtcatgaccattctcggggcgttcggagtgatgctgtttattaactggcagcttgctttattaacgtttatcattatgccgatcgtcatttggctagcgctttatttcaacaaaaaaatgaccaaagcatttaccacgctgaacaaggatatcggagacttcagcgcgcgtgtagaaaataacatcggcggcatccggcttgtgcaggcgttcggaaatgaagcatttgaaaaagaacgcttcgccgtcaacaaccagcgttttcgtgtcacaaagctttcttcctacaaaatcatggcgaaaaacggttcaatcagctatatgctgacccggtttgtcacgctgtttgtccttttgtgcgggacgtggtttgtcattcgcggctccttatcgtacggggaatttgtggcgtttgtactcttgacgaatgtgctgttcaggcctattgacaaaattaatgccattatcgaaatgtatccgagggggatcgcgggtttcaaaagctatatggagctcatggagacagagccggatattcaggactcacctgattcgaaagatgtttccggcctgaagggcaatatccgctataaacatgtttcgtttggctatgatgaccatcacaatgtcctcaatgacatcaacctatccattcaagcgggggaaacggtggcgttcgtcggtccgtcaggtgctgggaaatcaacgctttgcagtctgcttccgcgtttttatgaagcatcggagggcgacattacgattgacggcatcagtataaaagacatgacgctttcttcgttgcgcgggcagattggcgtcgtgcagcaggacgttttcttattctcgggcacgcttagagaaaatatcgcctacggccgactaggcgcatcagaagaagacatttggcaagctgtgaagcaggcgcatctggaagagctcgtccataacatgcccgatgggttggatactatgattggcgaacgcggcgtgaagctttccggcgggcaaaaacagcgtctgtcaattgcaaggatgttcttgaaaaatccgtcgatcttgattctcgacgaagccacctcagcccttgatacagagacggaagcggcgatccaaaaggcgcttcaagagttgtctgaggggcgcacgacgcttgtcatcgcccacaggctggcaacaatcaaagacgcggacagaattgtagtcgtcacaaacaacggtattgaagaacaaggccgtcatcaagacctgatcgaagccggaggcctatacagcaggctgcatcaagcgcaattcgggcaaatggtgcatcgataggaggagaacatggaaagaaaaactgtgctgtacattgctgtttcattggacgggatgatcgcaaaagaagatggaagcatcgattggctggatgaatttgaaggtgaaggtgacaacggctacagtgatttttatcagactgttgatacagtcattttagggcggagcacatatgagcacgttaaagtgctaacaccggttttcccgtatcaggataaaacctgctatgtttttacaggatcgcccgacagttatcaagatgaacatgtgacgtttatcaatgagggagccagagccttcactgcccgtttgaaacaggaaaaaggctcaaacatctggatagctggcggggcagagcttgtgaatgactttatgaaagaagatgccatcgacgaattcatcatcactgttattcccgtcgttttaggaagcggcatcccgctgtttcacgaactaacaaatgaaacaaaactgcggttaaaagggacaaaacaatttggacaagcggttcagctccattatgtaagagcataagaaaaaggatagacagatgtctatccttttttgtatgtaagttagagcgcttctctctcagcaggctcgatgagattttggaatttttcaatgagctgtgatgcttttgttccttcaactacgatcagatattccttttcattatgagccatgcggaacgtttcaagctcaattaagcttttgattttgcacatcgttttctttgaataaatataaacctcgtggcttccggaatggcacattttataaagatgaatcaaatttcttaaagtaaaggcctgtgcggctactttcagagacttgatatttttcatgatctttctcctccatcgattgttgtcttatatagcctaagttcccaaagctgacaagtcgtaaacctatttttgcacatttatgacttccattgcagcgcaccgcccccgatgcgtttgacaccgcggatggagcttaattcatccatcaagcggagaagcgccttgtctttctgctttgcttcaatcatgaaatcaatattagttccccattgcctaaagcgttccaacagtggcagcaaaaagttggcgtcaacataatcggcgtggctgcgtatcgcttgctccgattttggggaagacaagtgaacctttggctgaaggccgatccgctcccacgttttgatcatgcggggcagtgctacattcaggtcggcgtgatcgtctggattggcgtaaaaatgatgaaagtcaaagacaaacggaacatcctcctgctcacagacctgaagcgtttcttccgttgtatatgttttatcatcattttcaagtgtcatccgctctttgatctcctgcggcagctgttttatattttgatgaaattgtgcagtggcggtgtctttatttccgtaagcgccgccaatatgaatgttgataacggagcgatcagcaatgcccatggcctcaagcatgcggtagtgatacgccatatctgttaccgcattttttgtgacggattccttcgggctcgtaaacagagtgaattgatttggatgaaagcttgttcgcagttgatgggttttaacaagctctccaatctcccgaaactctttttgaaacggtgttacaaaatcccacatcacgtcgggatgcgtagccagcggcacaatcgaactggaaaaacggtacaaaggaatgccgtggccgatgatatagtgaagggttctcatcgtattgcgcaaattggcttttgtcacagtcagaagcgcttcttttctttcagtctttgaaagctttgaataacgcgcgaatgtcaatgttttagcgggagacgcatcccaaaggctcatcgcatttgaaacgaacccgaatctgaaaatcataggaactctcctttataagaaataagataatgccctgccgagccattccgccgggcgctgcctgaatgtgcgcttgctgaaatcctccatcgtcagcagctccgactttttcatatcctcctcaattgtggcatagacttcacttgtaaacgcttcgtcatcaatttcaacattcacctcttcatttaagaacaggctccgtttatcgaagttggctgttccgataatgctgagatggtcgtctatgatgagggcttttacatgataaaacccttgataataacgataaataagacagccggcatccaagagctccgaataatacgtaaaagccgcttctcgtaccagcggatggtctgatttcatcggtacaatgattctcacggatacgccgttttttcttgcgttaataagggcctcttgaagcggttttgatggaatgtaataaggcgtgcaaaccgtaaggcgattcttcgcttgggcaatgttggccaagtatatgttttcaagggaataaccgtcggtcgcatagatcttgtgagaaatagtcccttgctgaagctttggccaaacatccgaacccagttcgattccggtatttcgttttagatcagaagcaaaaagcgtttgaagatcatgtacgccttctccgatcatgcgcagatgataatcctcccaattgccgaacttcgccttctttccaagatattcttcggcgatattaaacccgccgatataaccgatttttccgtctatcaccgtaatcttccggtgattccgtttttgcatgtgaaaaaagaaaaaaggaaaacggggacgattcatcacatggacatggacgccggcatttttcatcgtctgaagcgccgtttttttaattgcccggcagcccgcccaatccagaagcaaataaacggatacgccagcttgggcttttgttttcagcaaggtatacatattgtggctgacctcatcatttttcataataaaaaacatcatgtgaacagaagaggcggcctggcgaatatcattcatcatccgctcaacgagatcagcgccgcagtggatcaattcgatgtcactcttcttttttgaaaaaacaggctcgtacgccttttttctgtatccggcacggcccatgaagatatcaagcagaatcaaggcaaagaaaataacgacaatgatcataatcacgataaataccttcataccggcactcctttccgtagtaaaggtagtgtgcccgaacagcaggaatttaattattgactgaacactcattcattatttatcataaagataatcttatacagattcgggggtaggggatcgcggtctttatcagtaaaaagggggaattggaatgagcggctttctcatcgcaaatgcattattatttctgattgtaaccgcttacgctgtctatttgtttgtttacttggtcaaaacgagactggcctacatcaagctcggccagaaagaacaatttgatcaacggttcaaggaacggcttcacgccatatgggtgaatgtattcggacagaaaaaactgctcaaggacaagaaaagcggaatcattcacgtcatgtttttctacggatttatattggttcagttcggagcaattgactttatcatcaaaggactggctcccggccggaatctgtcgcttggcccggtctatcccgccttcaccttttttcaggaaattgttacgtttctcattttaattgctgttgggtgggcattctacagacgttatatcgaaaagctcgtgaggctgaaacgcggtttcaaagccggactcgttctcatttttatcggaggattaatgctgaccgttctgcttgggaacgggatgaatctgatttggcatgagcatgggctttcttggagcgagccaattgcctcaggtattgcgtttatgcttagcggtgtcgggaaaacaggcgcggcggtgattttctatatcgcatggtggatccatctcctattcttgcttagctttttagtgtacgtgcctcagtcaaagcatgcccatttaatcgccggcccggcaaacgtctttttcaatcgaatggaatctgccggaaaacttgaaaaaattgattttaccgacgaaacgaaagaaagctacggagcgggaaaaattgaggatttcagacagtctcagctgcttgatctatacgcgtgtgtcgagtgcggccgctgtaccaatatgtgtcctgcaacaggcaccggaaaaatgctttctccgatggacttgattttgcgtctcagagaccatctcacggaaaaaggcgctgccgtcacctcgcgctccccatgggtgcccgcagcagcgtttcggcatacgagaggcaatcagctggctgcggcgtcagcgggcagcggatcgcaggaagccgcagcggcgcttgattacaatccaagcttgatcggcgacgtcatcacagaggaagaaatttgggcatgcaccacttgccggaactgtgaggatcaatgcccggtcatgaatgagcacgtggataaaatcatcgacctccgccgctacctcgtactgacagaaggaaaaatggacagtgacgcccagcgcgcaatgacaagtattgagcggcaagggaatccgtggggactcaaccgcaaggaacgtgaaaattggcgtgacgaggcgccggatgctgagattccgactgtaaaagaaatgaaaaaagaaggaaaagaatttgagtaccttttctgggtaggctccatggggtcttacgacaacagaagccagaaaatcgcaatttcctttgccaagctgctcaatcacgcgggcgtgtccttcgcgattctcggcaataaagaaaaaaattcaggagacacgccgcgccgcctcggaaatgaatttttgttccaagagctggctgagaagaatatttctgaatttgaaaaaaatgatgtcaaaaaaatcgttacgatcgatccccatgcatacaatttatttaaaaacgaatatccggatttcggatttgaaggcgaggtttatcatcatacagaagtgctggccgagcttgtgaaaaacggaaaattaagaccgcagcacccgcttcatgagacgattaccttccatgattcgtgctatttgggccggtacaatgaagtctatgatccgccgagagagattttgaaagccattccgggcgtgcagcttgttgaaatggagagaagccgggaaaccggcatgtgctgcggagccggcgggggattaatgtggatggaggaagaaacaggcaacaggattaacgtcgccaggacagagcaagcgctcgcagtcaacccatcggtgatcagttctggctgtccgtattgtctcacgatgcttggggacggcacaaaggcgaaggaagccgaagaccaagtcaaaacgtacgacgtcgtcgagcttctggctcaatccgttttaggcgctgatctgaaaatgggggagaagcaatgaatttttcattatcagaagaacatgagatgatacgaaaattggtgcgcgattttgcgaagcatgaggtggccccgacagcggctgaacgggacgaacaagaacgcttcgatcgcgagctgtttcgggaaatggcaaatctgggcctgacgggaattccatggcctgaagattacggcggaattggaagtgactatttagcctacgtcatcgcggtggaagagctgtcaaaagtgtgcgcctccaccggtgtgacgctttccgcccatatctctctttgcagctggccgctgtttgcctttgggacagaggaacagaagacagagtacttaacacagctggctctcggagagaaaatcggcgcattcgctttgaccgaagcagggtctggctctgacgccggcagcatgaaaacaactgctgaacgaatcggcgatgactatgtgttaaatggttccaaagtgtttatcacaaacggcggcgttgctgatatttacattgtttttgccgtcaccgatcccgagaaaaagaaaaaaggcgttaccgcttttatagtagaaaaggattttgaaggattttttacaggcaagaaagaaaagaagctgggcatccgttcttcaccgacaacggaaatcatgttcgaagattgtgtagtgcccgcatcaaagcgtctcggagaagaaggagaaggcttcaaaatcgcgatgaagacgcttgacggaggcagaaacggcatagctgcacaagctgtaggcatcgcccaaggagcgcttgatgcggcgcttcaatatgcaaaagagcgaaagcaattcggaaaatcgatcgccgagcagcagggcatcgcttttaaactcgcggatatggcgacaatgatagaagcttcaaggctactgacctatcaggctgcatggttagaatcatcgggccttccatatggaaaagcttccgccatgtccaaactgatggctggggatacggcgatgaaggtaacgaccgaagccgtgcagattttcggcggctacggctatacaaaagattatccggtagaacgctatatgcgtgatgcaaaaatcacgcaaatctatgaaggcactcaagaaattcaaagactggtcatctccagaatgctcgcggattaacggaaaacatctctcagtcggatcactcttgtaaaattatttaaattaacgctgttaagggtagcatattctgttttattttgtttataatgagaggtatggtttgtataagaacgatacaaaatcgctttcattattgataaaacagatacatataagtaatagaaagggagtgtccgaccttgggtatcaaacaatattcacaggaagagctaaaggaaatggctttagttgaaatcgctcacgaattatttgaagaacataaaaaaccagttccttttcaggagcttttaaatgaaatcgcatctttgctcggcgtgaaaaaagaagagcttggagaccgcattgctcaattttatacagatttaaacattgacggccgcttcctggcgctttctgaccagacgtgggggcttcgcagctggtatccttatgatcagcttgatgaagaaactcagccgacagtcaaggcgaaaaagaaaaaagcgaagaaagcagtcgaagaagatcttgatcttgacgagtttgaagagatcgacgaagacgaccttgatttggatgaagttgaggaagaactcgatcttgaagccgacgattttgacgaagaagatcttgatgaagacgacgatgatcttgagatcgaagaagatattattgatgaagatgatgaagactatgatgatgaagaagaggaaattaaatagtatcagatttcatcttcaaaacgatcttgactttcatagtcgaactatgtagtatgtattttgggctcttcaaaaacgaagagagaacatagtacgttatgctccctttcaagaaattgaaagggagctttcttattttcacccctcatttttcttataaatcatttaaaaggctaaatgattttttataaaatagtacattttaaaaatgtagctaagagcgaagagaggagcaaacgaaatgacgaaatatatttttgtaaccgggggagttgtatcctcacttggaaagggtattgtagcagcttcattagggcgtttgctgaaaaaccgcggactgaacgtgacgattcaaaaattcgatccatacatcaacgttgacccgggaacaatgagcccgtaccagcacggtgaagtattcgtaacggatgacggcgctgaaacagacttggaccttggtcactatgagcgttttatcgacattaacctgaataaattcagcaacgtgacaacaggtaaaatctattcaacagttcttaaaaaagaacgccgcggagattaccttggaggaaccgtacaggtcattccgcacatcacaaacgaattgaaagaccgtgtttaccgcgcagggaaagagacaaacgcagatgttgtcattacagaaatcggcggtactgtcggagacatcgaatcactgccattccttgaagcgatccgccaaatgaagagcgacatcggccgtgaaaacgtaatgtacatccactgtacgctcgtgccttacattaaagctgctggcgaattaaaaacaaaaccgacacagcacagcgtaaaagaattgcgcagcttgggcattcagccaaacatcatcgtcgttcgtacagaaatgccgatttctcaagatatgaaagataaaatcgcgcttttctgcgacatcgatacaaaagcggttattgaatgtgaagatgcggacaacctttactccattccgctggagcttcaaaaacaagggcttgataagcttgtttgcgagcacatgaaattggcatgcaaagaagcggaaatgtccgagtggaaagagcttgttaacaaagtcagcaacctgtctcaaacgattacaatcggccttgtcggcaaatacgttgagcttcctgacgcatacatttctgttgtcgagtctctccgccatgcgggctatgcgtttgacacagatgtaaaagtgaagtggatcaacgcggaagaagtgacagaaaacaatatcgcagaactcacaagcggaacagacggcatcattgtgccgggcggattcggagaccgcggtgttgaagggaaaatcgtcgcgacaaaatacgcgcgcgaaaacaacattccgttcttgggcatttgcttgggcatgcaggtggcgtctattgaatacgcacgaaacgtattgggcttaaaaggcgctcactcagcggaaattgatccgtcaactcaatacccgatcattgatcttcttcctgaacaaaaggatgttgaggatcttgggggaacgcttcgtctcggcctttacccttgtaagcttgaagaaggcacgaaagcctttgaagtgtatcaggatgaagtggtgtacgagcgccaccgccaccgctatgagtttaacaatgaattcagacagcaaatggaagagcaaggcttcgtattctcaggcacaagccctgatggacgccttgttgaaatcatcgagctgaaagaccacccttggttcgtggcttctcagttccacccagagttcaagtcaagaccgacaagacctcagcctctattcaaaggctttatcggagcgtctgtcgaagctgcaaatcagaagtaataaaaaagacttgccgtttgtcaaaagcgggcaagtcttttttatttgtttccggcaagttccagcatgtacaataagatattatgcatactcttgcagaatttcttttagtgtaaacgataaagcgtgatagacatacagtgctgtcattaaagagggaaacccgtaacgggtgccgtcttcatcgggaacaagcggcatttttaatttagaatcaatatgcacatcacaatactgttctattcccgcactgtctttggctgcgggcgatacgcatacgactcccgcacctttttcataaagctcttttgcgagctcctgttcttcggctgtgcccgtccctgagcaaaacatcagcaccctgtcgctttctgtcacttcctcagcgttttctggaaaggctttgacagatgggaagggttctttgctttcggtggcctcataaaagacgccctgaagctcattcgctccgtataaataaatggaatgcccgctgatcaccgcttgagcaagcagccgcgccccatcttcaatcgcgtcagattccttatcctgaatgcgggaaaaaatacctgttaactgcgtcgtgaatattttcaacataagtgaatcctcctttataacgtacaatatcagtatacaacaaaagagaaaatgctcagaaaatgtcgtaaagtagactattataattaaaggaaataggaaaatcaaacagaatacatacaatactgcttacttttgacgaaaatcataatattggggtgtaaaatgatgaatgaaaaaattttaatcgttgatgatcaatacggcattcgtattttgctaaatgaagtgttcaataaagaaggctaccagacgtttcaggctgcgaacggcctgcaggcgcttgacattgtgacaaaagaacggcccgaccttgtgctgttggacatgaaaattcccggcatggacggaatcgaaatcttaaaacggatgaaggtcattgacgaaaacatccgggtcattatcatgacggcatacggagagctcgacatgatccaggaatcgaaggaattgggcgctctgacgcactttgccaagccgtttgacatcgacgaaatcagagacgccgtcaaaaaatatctgcccctgaagtctaactgacaaaaagaagaaacaaatgaatcatgtcattatgttgccgatttgtcgaaaagttggtatcctagttatggagaaaaagcgatctgagtatttacatatgacagcaatatatgggtcatgctagggtggaaagcttttttcgctagaagacaatcaggctacataaggaggacattcgacatgcctttagtttctatgacggaaatgttgaatacagctaaagaaaaagggtacgctgtaggacaatttaacttaaacaaccttgagtttactcaagcgattttacaagcagctgaagaagaaaaatctccagtgatccttggtgtttccgaaggtgcgggacgctacatgggcggcttcaaaacagtcgttgctatggtaaaagcacttatggaagagtacaaagtgacagttcctgttgcgattcacttagaccacggttcaagctttgaatcttgtgcgaaagcgattcatgcaggtttcacatctgtaatgatcgacgcttctcaccatccatttgaagaaaacgtagcaacaactgctaaagttgttgagcttgctcatttccacggagtatctgtagaagctgagcttggaacagtaggcggacaagaagatgacgttatcgctgaaggcgtaatctacgctgatcctaaagagtgccaagagcttgttgagcgcactggcatcgactgccttgcacctgcattaggttctgttcacggcccttacaaaggtgagccaaaccttggcttcaaagaaatggaagagatcggaaaatcaactggccttccgctagttcttcacggcggtactggaattccgactgctgacatcaaaaaatcaatttcacttggtacagctaaaatcaacgtgaatactgaaaaccaaatttcttctgcaaaagctgttcgcgaaacattggcagctaagcctgacgagtacgatccacgtaaataccttggaccagctcgtgaagcgatcaaagaaacagttatcggtaaaatgcgtgaatttggttcttcaaaccaagcttaattcaattggaactttttatagccgcctgacagcttgacaggcggttttccgtctatctttagaaagcgcaatcatattcgcagttcagaaaatttcttaatcagggaggctttttgaaaatgttattctttgttgatacagccaatatcgatgaaattagagaagcgaatgaattaggaattctcgccggtgtaacgacgaatcctagtttagtagcaaaggaagctaacgtatcattccacgaccgtcttcgcgagatcacagacgtcgtgaaagggtctgtaagcgcagaggttatttctttgaaagctgaggaaatgatcgaggaaggaaaagaactggcgaagatcgctccgaacattacggtgaaaatcccaatgacgtctgacggtttaaaagcggtaagagcacttactgacttaggcatcaaaacaaacgttacattgatcttcaatgccaaccaggcgcttcttgctgccagagcgggggcaacatatgtatctccattcctgggacgtttagatgacatcggccacaacgggcttgacctgatttcagaagttaaacagatttttgacattcacggccttgacacgcaaatcattgcagcgtcaatccgccatccgcagcacgtgacagaagctgctcttagaggggctcatatcggcacaatgccgctgaaagtcattcatgcgctcactaaacacccgttaacagacaaaggaatcgaacaattcctggcagactggaacaaataatgaaaggggcggcaaacagctttatgcctgtttgccgcggcctttgtatttcaccgacctgatacagcggatcttcagatgctgacgccgctttacagagaaggaatcattgggctgcagaagctgatatcggaatgaagggtatgcgtactgcttttgccggatgacgacgatgtctctcgagccggcgggtctctgtgcatcttttgaaacctgtaccccccaaagcttcgctattttcttcctgatattttacaatgtgttgtattctttctcttcgaattggctagattttggacatgagctttatttgcagagacagaataaaatgacattttatttagctccgcagctatcttcttatggaaggagactatcatggaaaagttgaatattgccggcggtgactcgttaaacggtacagtacatatcagcggcgctaaaaacagcgctgttgcgttaatacctgcaaccattttggcaaattccgaggtgacaattgaagggcttccagagatttcagatattgaaacgctgcgtgacctgttaaaggaaatcggcggcaacgtgcattttgagaatggggaaatggttgttgaccctacgtcgatgatcagcatgccgcttcctaacgggaaagtaaaaaagcttcgcgcgtcatattatttaatgggggcgatgctcggccgcttcaagcaggcggtcattggattgcctggcggctgtcacttagggccccgtccgattgatcagcatatcaaaggctttgaagcactcggagctgaagtaaccaatgaacaaggcgccatttatttgcgagctgaaaggctgagaggcgcacggatttatttagatgtcgtaagcgttggggcaacgattaacattatgctcgccgctgttttggcagaagggaaaacgatcatcgaaaacgctgccaaggagcctgagatcattgacgtcgcgacattgcttaccagcatgggcgccaaaatcaaaggtgcgggcaccaatgtgattcgaatcgacggcgtgaaggaactgcacggctgcaagcatacgatcattccggacagaattgaagccgggacatttatgattgcaggggctgcaatgggcaaggaagtcattatcgataacgtcatccctactcatcttgagtcgttaacggcaaagctgagagaaatgggctatcatatcgaaacaagcgacgaccagctcctcattgtcggcgggcagaagaacttaaagccggttgacgtcaaaaccctcgtatacccggggtttccgactgatttacagcagccgatgacggcgctcctgacaagggcgaaagggacgagtgtcgtcacagacaccatctactcggcaagattcaagcacattgatgagctgagacgaatgggtgccaatatgaaagtagaaggcagatctgccatcatcacaggtcctgtcgagcttcaaggcgcaaaagtgaaggcgagtgatctgcgtgccggagcctgcttggtggtagccggactgatggctgatggcgtcacggaaattacgggactggagcatattgaccgaggatacagcagccttgagaagaagcttgaggggcttggagcgacaatttggcgtgaaagaatgactgacgaagaaatagaacagcttcaaaattcataatggtttcttgtgagaggagatcgtgttgaaatggaaagaagtttatcaatggaattggtacgtgtgacagaagctgcggcattggcatcagcaagatggatgggccggggaaaaaaagatgaggctgatgaagcggcaacaagtgcaatgagagacgtttttgatacagtgccgatgaaagggaccgttgtaatcggtgaaggggaaatggacgaagcgccaatgctgtatatcggggaaaaactcggaaacgggtacggccctcgcgttgatgtcgcagttgaccctcttgaaggcacaaacatcttagcaagcggcggctggaacgcgctgacggttatcgcggtcgcagaccatggcacgcttctgaatgctcctgacatgtatatgcaaaaaatcgcagtcggtccggaagcggtgggctgcattgacatcgaagcacctgtcattgacaaccttaaagcggtggcaaaagcgaaaaacaaggacgttgaggacgtcgttgccacaattttaaaccgtgaaagacacgcaaaaatcatttccgagcttcgtgaggccggcgccagaatcaaattgatcaatgacggcgatgtcgcaggcgccatcaacacggctttcgaccacacgggcgttgatatcctgttcggatcaggcggcgctcctgagggtgtgctttccgctgttgcgctaaaagcactcggcggagaaatcattggtaaacttcttccgcaaagcgaagaagaaatcactcgctgtcacaaaatgggccttgatttaagcaaagtgcttcgcatggaagaccttgtgaagggtgatgacgcgatttttgcagctacaggggttactgacggcgagctgttaaaaggagttcaattcaaaggctctgtcggtacaactgaaagcttagttatccgtgcaaaatcgggcactgttcgtttcgttgacggcagacacagcttgaaaaagaaaccaaatcttgtaatccgtccataacaaacagaaaaagcgggtgtgagcccgctttaacttttgcagaaaagcgtcaactctatcaattccgtgtcaaaaccttatttcagttgaataattttttgaaataaggtaaaaataaagagtgctgcgaattttactgcgtaataccttcttttaagcactaggaaagtttcaatttctaccgcatacagacgatataagtattgatcttctcatgtttttgtcctcgcttccttcaaaactcattaagacaatccttttaacaaaagcgccgatcatgggtggaagtgttaccgatagaagttcctttatgttaaaaaaagaatgtgctttggcggatgttgtgcaaaagcagcagatgacatgttcagagtaagatattgactatgaaaagcgtggtgtttttatgaaagacgtatctatttcctctttggaaaatatgaaattgaaagagctttatgaacttgcaagacattataaaatctcctattacagcaaactgacaaaaaaagaactcattttcgccattctgaaagcgaatgcagaacaggaagatctgctgtttatggaaggcgttctcgagatcatccagtctgaaggtttcggattcctgagaccgatcaactactctccaagctcagaagacatttacatctcagcttcacaaatccgccgtttcgatttgcggaacggagacaaagtatctggcaaggttcgcccgccaaaagaaaatgagcgttactatggacttttgcacgttgaagcagtaaatggggatgatcccgaatctgcaaaagagcgtgtgcatttcccggctcttacgccactttatccggatcgtcaaatggtgcttgaaacaaagccgaacttcttgtctacaagaattatggacatgatggcgccggttggatttgggcagcgcggattgattgttgcgccgccgaaagccggaaaaacgatgttgctgaaggaaattgccaacagcattacagcgaaccagcctgaagcagagctgatcgtgcttttaattgacgaaagacctgaggaagtaaccgatatcgagcgctctgtagctggggatgtcgtcagctcaacgtttgatgaagtgccggaaaaccatatcaaagtggccgagcttgtgcttgaacgtgcgatgcgtctcgtggaacacaaaaaagacgtcattatcctgatggacagcatcacacgtcttgcccgcgcctacaacttagtgattccgccaagtggaagaacgctttccggggggattgacccagcggcgttccaccgtccgaaacgcttctttggggctgcgagaaatatcgaagagggcggcagcttaaccatccttgctacggctctggtcgatacaggttcacgtatggatgatgtcatttatgaagaattcaagggaacaggcaacatggagctccatcttgaccgctctcttgccgagcgccgcatcttccctgccatcgatatccgccgttcaggaacgcgcaaagaagagctgcttgtgcctaaagagcatcttgatcgtttatggtctatccgcaaaacgatgtctgattcacctgatttcgcagaaaagttcatgagaaaaatgaaaaaaaccaaaacaaaccaggaatttttcgatattctcaatcaagaatggaaacaggcaaatctatcatctgcaagaaggtaaattgtatttgcaaaagaagtaaatcactgatataattttctcatatgcgtttcggacaatgctccgaaataataactctgtttccacacgggattcagggcggaaggagatggatacaatgaaagcaggaattcatcctaatttcaaaaaagcaacagttaaatgcgcttgcggaaatgaatttgaaacaggctcagtaaaagaagaggtacgcgttgagatttgctctgaatgccacccattctacactggccgtcaaaaattcgcttctgctgatggtcgtgttgatcgctttaacaaaaaatacggtcttaagtaataatagatttctcaacaggcaagcagcagtcttgcctgttttttatattgtctaaaacacagctggcagagagaggggagcgaagcctatgtacataatgaaacaaagcgggtggcttgagctgatttgcggcagcatgttctcggggaaatctgaagagctgatcagaagagtgaagagagcaacttatgccaagcaggaagtcagggtatttaagcctgtaattgataaccgatacagcgaagctgctgttgtctcccataatggaacatcgatgacgagctatgccatttcgtctgctgcggacatttgggatcacatcagtgaaagtacagatgtggttgcggttgatgaagtgcagttttttgatcaggaaattgttgaggttttatcatctcttgccgataaaggctaccgtgtgatagcagcaggccttgatatggattttaggggagagccgttcggtgtcgtcccgaatatcatggcgattgcggaaagtgtgacaaagctgcaagccgtctgttctgtttgcggatcaccggcgagcagaacacagcgcctcattgacggcaaacctgcttcttacgatgatccggtcattttggttggtgcagctgaatcatatgaagcaagatgcagacatcatcacgaagtcccaggtaaatctaaaaaatagtccaaaacatgggtataaagatagaatgcaccggctaaaaacaccggtgttttttttatattctgataatattcaattaaaaaatttaaataagtatattaaaaaattaagtaattttcttctcttgaattttgattttgacaggcatacaatagcttacgtaatgtaaatagttttgagacattgttcgaataattgtcacaaagtcgcataaagatcatgatcggtcatattttagatgggttattacttaacttggttaactatttcaagaaagaaggagatttgcttgaataacataaaaaaaacgaaagaaggccacttagaaacaactcttagaggaaaagaagttttatctattcctactttaaataaaggcgttgctttttcactagaagaaagacaagaactcggcttagaagggcttctgccgccaactgtactttctcttgatcaacaagcacaacgcgcgtacgagcaattccaagcgcagcctgaccgccttcgtcaaaatgtttacttaagtgatcttgcaaaccgtaacgaagttcttttctataaattgctgaaaaaccatcttcgcgaaatgcttcctgttgtgtacacgccaacagttggtgaagcgattcaggaatacagccatgaatatagaagacctcaaggaatctacttgtcaatcgataacattgacggtattgaaaaagcgtttgaaaaccttcatgcgacagcaggcgatattgatcttatcgttgctactgactccgaaagcattctcggtatcggtgactggggtgtaggcggtattaatattgcaatcggtaaattggctgtctacactgctgcagctggtattgaccctagccgtgttatcccggttgtgcttgatgtcggtacgaacaacgaaaaacttctaaacgatcctttatatattggtaacaagcatgaacgtgttcaaggtgaacgctacgaagctttcattgacgcttatgtaaaagctgcattgaaattcttccctaaagcgcttcttcactgggaagaccttggcaacaaaaatgcacgcaacatcatgaaaaaatacaatcatgaaatcctgacatttaatgatgatattcaaggtactggcgcgattacacttgcaggtgtgcttgccgctatgaagaaaaccggcgcttctattaaagatcagcgtgttgttatcttcggtgctggttctgctggtatcggtattgctgaccaaatccgtgacacaatggtgctagccggattatctgaagaagaagctaacaaacgtttctacacacttgattacagaggcttgctgactgaagacatcgaaggcatccttgatttccaaaaaccttaccttcgcaatgcggatgaagtgaaagactggaagcgcgatgaaaaaggtcaaattccattcgatgaagttgttcgtcaagcgaaaccaacaatcttgattggtacttcaggggtttcaggtgcattcacagaggaaattgtaaaagaaatggcatctcacgtagaccgtccggttatcatgccgatgtctaacccgactcaccttgctgaagctgttcctgaagatctgttcaaatggactgacggaaaagtgcttattgcaacaggaagcccatttgacaatgtagaatacaacggtgtttcttatgaaatcggacaatctaacaacgcattcgcgttccctggtcttggacttggttcaattgtagctgaagcgcgtatcattacacctgctatgtttgctgcaactgctgatgcgattgctgaaatggttgatcttgaaacacctggagcaggattgcttccaagcattgataagcttcaagaggtttctatccaagttgcgattgccgttgctgaagcagcaattaaagacggcgtggcaaatcgtcagcctgaagatgtgaaacaagcggtacttgatgcaatgtggacacctgaatacaaaaaagtcatcgcgaaataattagcgagtaaatttttctgtccgagggaaagctttttgtaaagctaaagtatacggacataggatttggaggagaatattttgagcatcttagatatcttaatcctcctggcgccgatcttctttgttatcgtgctgggttggtttgcaggacattttggaagttatgatgccaagtcggcaaaaggggtaagtacgttagtaacgaaatacgcacttccagctcactttatcgctggtattttgacaacttccagaagtgaatttttatcacaagtacctttaatgatttctttaattattgggattgttggtttctatatcatcattcttttggtttgcagatttatattcaagtatgatttaacgaactcatctgtattttctttgaactctgcacagccgacattcgcatttatgggtatcccggtattgggaagcttattcggagcgaatgaagttgcgattccgatcgcggtcacaggtatcgtggttaacgcgattcttgatccgctcgcgatcattatcgctactgttggtgagtcttctaagaaaaacgaagagagtggcgacagcttctggaagatgacaggaaaatcaatcctgcatggtctttgtgagccgcttgcagctgctccgttaatcagtatgatcttggtgctggttttcaatttcactcttcctgagctgggtgttaaaatgcttgatcagcttggaagcacaacatctggtgttgctctcttcgctgttggtgttaccgttggtattcgtaaaattaaactcagtatgccggctatcggtattgcgttactaaaagttgcggttcagcctgcgttaatgttcctgattgctcttgctatcggacttccagctgaccaaacaacaaaagcaatccttcttgttgcattccctggttctgccgttgcagccatgattgcgactcgtttcgagaaacaagaagaagaaactgcaactgcgtttgtggtcagtgcgattctgtcattgatttcacttccaatcattatcgcgcttactgcgtaacaaaaaaagctccctttaagggagctttttgctttaggtttgaaatttgaacagtgacagcagcggtttttttcttgttttggttttttcagaagcagcagcagtctcggggatcgaatgagcggtgaattctttcatttgtgaggtcagtgattgcagatctgcaagaatatcatcgatttctctgcggtgctgaagcagctggtaagatacaccttcatcggctttttgtttcagctggcgttccagttccgacatccttgccatcaattcgctttcgtcctgcctttgctgtaaaagggtgtccagcttttgttcaagctgctcgattcttcgttctgtgtcgctacttgttttttggacaaggaagcctgtgcgctttttagcgcttttcggcagatgaatatcctgaatcgccgtgccttcagagatttgtttttgaacggattttagaaccttcacgtcttctgccgtgaacgaatagtgtccgagctcattgcgttcggccggaagattcagctgcttcacccaccgctgcaccgtctttgcggagacgccgagttcacttgctaccatatttgtattcatgatcccatacctccttttaagctaggtattcgaccatagaatgcggttcccttcccgttagacaaaacaagaaaagattcggcaaagaaagtgggtatctcctttttttcttcaaaaactgttattgttcatacagttctaatggaagctggtcaggatcaaaaaagaaggtgaaacgcttgccggtcagcggatctgttctgattggctctgtttcgattcctttttcatgaagctcttgaacagctttatccaagctgccgactgtaaaggcgaggtggcgcaggcctgcggcttcaggccgggtttgtcgttcgggcggatcgggaaacgagaacagctcaatgacatacgagccgttaagcgacaaatcaagcttataggagccgcgctcttcgcggtacgtttcttgaatcacctgaaaaccaagcttatgtacgtagaaagctttcgacttttcgtaatctgaacatatgattgcaatatgatgtatggatttcagcaacatcatccctcctcgaattccagtatagcagagggagcttttccagctgggattgaaatgcttttgactggggttaatcactatactataatgagaatgttacgcacaggaaaacagaggtgaagaccgtgttagaccgtttaaaatcaattgaagaacgatacgagaaattaaatgagcttttgagcgatccagaagtagtcaacgatccgaaaaagctaagagaatattcaaaagagcaatctgatatacaagaaacagttgacgtatatagacaatacagagatgcgtcagaacagctggctgatgcaaaagcgatgcttgaagagaagctggatgctgagatgcgcgacatggtgaaggaagagatttctgaacttcagaaggaaacggaaacactgtcagaacggctgaaggtgctcctgatcccgaaagatcctaatgacgacaaaaacgttatcatggagatccgcggggctgcgggaggcgaggaagccgctttattcgcgggcaatctgtacagaatgtattcccgttatgctgagcttcagggctggaaaacagaggtcatggaagcgaatgtaaccggaacgggcggctacaaagagatcatctttatgattacaggaagcggcgcgtattctaaactcaaatatgaaaacggcgcccaccgcgtacagcgtgttccggaaacagaatcaggcggacgcatccatacatccactgcaacagtggcatgtcttcctgaggcagaagaggtagaggtcgacatccatgagaaggatatccgtgtcgatacatttgcttcaagcggaccgggcggacaaagcgttaacacaacaatgtctgcggttcgtctgactcacttgccgacaggtgttgttgtatcatgccaggatgaaaaatctcaaattaagaacaaagaaaaagcaatgaaggttctccgtgccagaatctatgataaatttcagcaggaagcccaggctgaatatgatcaaacacggaaatcagcagtcggatctggtgaccgctctgaacgtatccgcacatacaacttcccgcaaaaccgtgtgacggatcacagaatcggtttgacgattcaaaagcttgatcagattcttgaaggaaaacttgacgaagtggttgaagcgctgattgttgaagatcaggcaagcaagcttcagcagtcggaaggttaagatgaagacgatattcgaagccctgaaatgggcttcttcttatttaaccgaagcgggaagagaagaaaatgcggccgagctcctattgctttatgataccggaatggagagaagcaagctgctcgcaagcttacaggaaccgattggtgaagacgaactgtatcgctttaagcgtcacgttgagatgcataaagagggcgtgccggttcaatacattataggaaaagagtttttttatggacgggaatttatggtgaatgatgatgtgctgatcccgcggccggaaactgaagaagttgtctttcatttgcttgaaaaatatcggagtgttttttctgaagacggcaagctcgaagttgttgacgttggtacagggagcggcgcaatagccgtcacgcttgcgcttgaaaaccaaagcttttctgtgtcggcggtcgatatttcgaaagaggcgctgcaagtcgcctctgccaatgcagaaaaactcggagcgaatgtgcgcttttatcagggcgatctgcttgagccttttattaaggcgggaaaaaaagcggatatcattgtctcaaacccgccatatatttcagaggaagaaatggctgatttatcggaaattgtccgttttcatgagccgctgcacgcactcaccgatggcggagacgggctgaaattttataagcggtttatggaagacattccgcttgttatgaaggataaagtatttgtcgtttttgaaatcggctggaaacagggagcggcggtcaaagacctgatcctcaaggcgtttaagggggcggaagtggaagtgctgaaagatattaatggaaaagacagaaccatatgcgctctgattcataaaaataaataagcagcttgctggcgagtgaatggatcaagctgtttaacaccagcaaaggggatgtaaacatgaaaaaggccctgacagcaggaatcctgctcattgcgattgagagcatgattggcaccatttttccgcaggctctttcatatgaagcgatttttggcgttgcgtctctcgttttagtggggctcgcgatcattacatcgggtttggctgtaagcggaagcgatcagcgggcaaactaccattcagaaaccaaagaaggccgtacatctcgcatgaaaatggcggccgctttctttgttgcggcgataccttccattctatgttatttactgacgattttgttttaataaaaaaggaagcctcttaggcttcctttttttgcagtaaaacagaatcccatatccaatagataagagctgttaatacagcgaaaagataaaaggctgtattttgaaacagagattgtcccgaaggctgaagcatgccgaaaatgatcgcgttggcaataaaagcagcggcaaggtaatacagcagatacaaagggctgaaacgtttcggctttttattcatcatgatttgaagcggcagtgcgaagatcaaataaggaaacagaaaataaaatgccattgtgatgagagcggcaatgataaatgaatgaatataaattactgaataaagaacggacatcgtgaatgctgataacagcactgtataattgtatttcatcttaaacctcctaaaacactatcgtaccataaataagattaacagcttgctagatttttttcaccctgcacgtttatcccaggctctccttgtccataatagggctagaaacaaagcacggagaggaacggtggggaccgatgaaaaaaacagtaatcatttgtatatatatctttcttttattatccggagcgctcgtagggctggcaaaagaagagacggcacaaaaatcggaaaatcagccggtggtcatacctgatcaggcgattcgtttgagaatactggcaaacagcgatagtgatcaagaccagcaattaaaacgtcatataagagacgcggtgaataaagaaatcacaatttgggtaaaggatattacttctattgaagaagcgcgtcgcgtgattcgttcaaagctgcctgaaatcaaagcaattgcaaaggaaacaatggagaaagaaggagcgaatcagtcgatatccgttgattttgacaaaatctcgtttccgacaaagctttacggcaacatggtatatcccgctggtgagtatgaagcgattttgattacgcttggaaacggagacggcgccaactggtggtgtgtgctgttcccgcccctctgctttcttgatttttctaacggggaagccgtcaaagaacaagaagataaagaagcctcaaaaaagcagactgaaaaagtgcttgaggacgtaaccgctaaagcggaaaaagccaaaaaagaagagaacgaagaaaaagaagacggcacagaagtgaaattctttttagtcgaatggatttccgaccttttttcctaatcatctggtctaaaaatagatttgcctcatagattggaagaaagaacgcaaaaacggggtgaacggatgttttatcaactgcgggtggcaagggaaaaagacggagatgtgctcgaggcatttttaaaacaggcaaaaaccagctatgaaggcgtgaaagaaggcttcactcaatttcttatgctggaggacagtgagaaaaacattgccggatgcctcggtattgaaaaaataagctgtgaccaggggctgctgcgatcacttgtcatatcggacaagcttcaccaaggccacatcgtcacgctttttcaaagcatggaggtgctgtgcgaaaagcatcagatcaaaaccgtgtacctagtagcaaatcagcattcctctgcggactttctgacggccatgggttttgaaagagctgagagtgtaccggaggagctgttttcttctgatcacttctgtgaatcgcggcaaacagaaggagccgttttgatgaaaaaagcgtctggataagtgcagtttatacacatacttatccacttctttattagcgttgtccacaatttgtggataacgcttgttttattacaggacatcttttatactttcaaaaggattacacgcgtaaaacaatcgttttattgttgtgaataaggagtttggtcagaaatgaaaacgaaaagatggtttgtggatgtaactgacgagttatccacaaatgatccacaaattgcacaagcagccgctttgctccgagaaaatgaggtcgttgcctttccgacagaaacagtatatggcctaggcgcaaacgcaaaaaatacggatgccgtcaaaaaaatatatgaggcgaaagggcggccgagcgataatcccctgattgtccacattgcggatatcagccagcttgaggatttaacgggcccggcgccggaaaaggcgaaaacattgatgaaacggttttggccgggagcacttacgctcattctgccttgcaaacctgatgcgctttcacctcgtgtaacggcaggtcttgaaacggttgccattagaatgccggatcatccgcttgcccttgcattgattcgcgaatcgggactgccgattgcagcaccgagcgccaatctatcaggcaagccaagtcccacaaaagcggagcatgtggctcacgacttggatggccgcatagccggtattgtggatggaggccctaccggaatcggggtcgaatcaactgtgctttcatgtgcggacgacatccctgttctcttgcgtcctggcggcattacgaaggaacaaattgaagcggtgatcgggccgatccatgtggataaagggctcagcgaccaaaacgagaagccgatttctccagggatgaaatatacacattatgcgccgacagcgcctcttgccatttgcgaaggcagcccagagcgcattcagcacctcattcaagaatatcaacagggtggaagacgggtcggtgtcctgacgacagaagaaaaagcgggcgtttattccgctgattatgtgaagagctgcggaagacgggctcagcttgagactgttgcggcagggctgtatgatgctttgcgcagctttgatgagaataaggtggatttcattatagcggaatcctttccggatacaggtgtcggtcttgctattatgaacaggctgatgaaagccgccggaggaagagtgattcgctgaaagcagtcagatgttctaaccctttttggacacgcataggctaaaaaagcggggcgtgtccaagggggttatttatgtatgtcggatttgtttataggcgaactgattacattaagcatcatggcgtttgctttagggatggatgctttttctgtcggccttggaatgggcatggtcaaacttagaaagaagcagatattctatattggtttcatcatcggcctctttcacgtcatcatgcctctcgcagggatggcggccggtaacatgctgtcagggctcctcggcgtgttagcggtttatatcggtggggcgctgctttttgttcttggggttcaaatgcttatggcctcttttaaacagtcagaagaacgattcatgtcaccggcagggccgggcttattgctgtttgccatcggcgtcagccttgacagcttttccgtcggcttgagcttggggatatacggctcgcatccgctcctcacaattaccctgttcgggctgttcagcatgatgttgacatggctgggcctgctggtcggaaaacaagtgcagtcatggcttggcacatacagcgaagcgctcgggggcatcatattaatcgtgtttggattaaagctgcttttgccaatttaatataccaataaaagaaacgaagtcgccgtttcttttttcttcatatataatagagaaaaataaggggtgactgacatggatattatttttgtctgtactggaaatacgtgccgcagcccaatggctgaggcgctttttaaatcaattgcagaaagggaagggctgaatgtcaatgtccgctcggcaggcgtgtttgcttcacctaatgggaaagcgacgcctcatgcagtcgaagcgctgtttgaaaaacacattgcccttaatcatgtgtcttctccattaactgaagaacttatggaatcggctgatttggttctggctatgacccatcagcacaaacagatcattgccagccaatttggacgttatcgtgataaagtgtttacgttaaaagaatatgtcacaggcagccatggtgatgtcctcgatccgttcggcggctcaattgacatctataaacaaacgcgagatgagcttgaagagcttcttcggcagctggcaaaacagctgaaaaaagaccgtagataagttgtcagaaaatctgcaaacaggtcatttgcaaatcctgcgtgaaggagtagaatatagtgaaaagcacatcatatggtgtgaatcaaagagcggacaggctgcgcggtcaataaagcgggcgggccgcatcacacacgctgggaggaaaagcagatgaaagtagccattgcatcggatcatggcggcgttcacattcgaaatgaaatcaaagagttaatggacgaattgcaaattgaatatattgatatgggctgtgactgcggcagcggctctgtcgattatccggattatgcttttccggtggccgaaaaagtggttagcggcgaagttgacagaggcattttaatttgcgggacaggcatcggcatgagcatttccgctaataaagtaaaagggattcgctgcgcgctggcgcacgataccttcagcgcgaaggcgacgagggagcataatgacacaaacatccttgcgatgggtgaacgggtgatcggacctggtttggctcgggaaatcgcaaaaatctggctgactactgagtttaccgggggaagacaccaaacgcgtattggaaaaatctccgattatgaagagaaaaacctgtaggggtgctgtttaatgaatgagttgaaacaaacgtggaagacgatgctgtctgagtttcaggaccaagcggaattgaaacaagatcagctcttcgtccttggatgcagcacgagcgaagtggccggcagccggatcggcacatcgggcagtgtagatatcgctgaaagcatctacagcggacttgctgagctccgggaaaaaacgggaatccatctggcgtttcaatgctgcgagcatttaaacagagcgcttgtcgtcgaagcagaaacagccaagctgttcaggcttccaaccgtttctgccgtgcccgttccaaaagcgggcggagcgatggcgtcttatgcgtttaagcagatgaagtctcctgttcttgttgaaaccattcaggctgacgccggaattgatataggcgatacgtttatcggcatgcatctgaaaccggtggctgtccctgtgcgtgtctctcaaaacagcctcggttcagctcatgtgacattggcgcgtacacggccgaaactaatcggcggagtgcgggcggtttatgagtgcgaatgaaaggactgcatagccagtcttttcttttattttaagatagtgaaataaattccgaactttaaattaaatttaagttattaatattcgtttttaccaataaaaatttagattttttaaaaataatcttttacatcggccttaaaaaccatgtacaatagtgatggtaaaaacaaagaacaggatacggataggagaggatctcgctgatgaaacatttacctgcgcaagacgaacaagtgtttaacgccattaaaaatgagcgtgaacgccaacagactaagatcgaattgattgcttctgagaactttgtaagtgaagcggttatggaagcacaaggatctgttttgacaaataagtacgcagaaggatatccgggcaaacgctactacggcggatgcgagcacgtcgatgtcgttgaagatatcgcccgtgaccgcgcgaaggaaatctttggagcggagcatgtaaacgttcagcctcattcaggcgcacaagcaaacatggcagtgtacttcacgattttggagcaaggcgatactgtacttgggatgaacctctcccacggcggccatttaacacacggaagcccagtcaacttcagcggtgttcaatataactttgttgagtacggcgtagataaagaaactcaatatattgattacgatgacgtgcgtgaaaaagccctcgctcataaaccgaagcttatcgtagcaggagcaagtgcgtatcctcgtacaatcgactttaagaaattccgtgaaattgctgatgaagtcggcgcttacttcatggtggatatggcacatatcgcaggacttgttgcggcaggccttcatccaaacccggttccttacgctgatttcgttacaacaacaacacataaaacacttcgcggtcctcgcggcggtatgatcctttgccgtgaagagtttggcaagaaaattgataaatcgatcttccctggaattcaaggcggccctctgatgcacgttattgccgcaaaagctgtttcattcggtgaagtattgcaggacgatttcaaaacatatgcacaaaacgtcatttcaaacgcgaaacgtctggctgaagccttaacgaaagagggcatccagctcgtttcaggcggaacagacaaccaccttatccttgttgaccttcgttcgctcggactgactggtaaggttgcggagcatgtacttgatgaaattggtattacgtctaacaaaaacgcgattccatatgatcctgaaaaacctttcgtaacaagcggcatccgtcttggtacagctgctgtaaccagccgcggttttgacggagacgcattagaagaagtcggtgctatcattgcgcttgcattgaaaaaccacgaagatgaaggaaaacttgaagaagcaagacagcgtgtagctgctctgactgataaatttcctttatataaagaattagattattaagatcctaaaacccgcttgggcttatgcccggcgggttttttgacgatgttcttgaaactcaatgtctttttttgtagaatcaatagaagtgtgtaattgttgatgggacaataaaaaaggagctgaaacacagtatgggaaaggtttatgtatttgatcatcctttaattcagcacaagctgacatatatacggaatgaaaatacaggtacgaaggattttagagagttagtagatgaagtggctacactcatggcatttgaaattacccgcgatcttcctctggaagaagtggatatcaatacaccggttcaggctgcgaaatcgaaagtcatctcagggaaaaaactcggagtggttcctatcctcagagcaggattgggaatggttgacggcattttaaagctgattcctgcggcaaaagtgggacatgtcggcctttaccgtgatccagaaaccttaaaacccgtggaatactatgtcaagcttccttctgatgtggaagagcgtgaattcatcgtggttgacccgatgctcgctacaggcggttccgcagttgaagccattcacagccttaaaaaacgcggtgcgaaaaatatccgtttcatgtgtcttgtagcagcgccggagggtgtggaagaattgcagaagcatcattcggacgttgatatttacattgcggcgctagatgaaaaattaaatgaaaaaggatatattgttccaggtctcggagatgcgggtgaccgcatgtttggaacaaaataaaaaatgaaatccccaaaagggggtttcatttttttatccagttttttgctattcggtgaatctgtatacaattataggtgaaaatgtgaacattctgtggagacgtaaagtataaaaagttttttaactttaaacagattgacacatgttaggggctattgtatgctaaacgagggtattatgagaaggttttcatagctttcattatagtcctcatcctcaatgtaaatcctctcagcaaacccgtattatgaggatttatttaagcgaatgaaacagcatccctgcaaggcttgcggatgaatgattttttcgaacaggcccgttttgccggtcaaaaaaggtcttctactaagggttaaccgctgatttttgccgtatccaagctatacattattttttcatcaggagacagataattgatggacgatcccaagcttacatttagcagacaacgcaaatatttattgttcattttggcagtgtatgtactgggttatggtttaacagcgtataaaaccgtttttttaggccttattctgggaactgttttcagtttgtttaattttttactgctcgtcagaagaatgaatgcttttgacagagctgtagagaaaggaaagtccatacgatctctcgggagcgcagcgcggtggtgcaatgcgattcttgctgtggctgttgcctataaaaatcccgaatactttcatatggcaagtacagttattggattaatgacaatataccctgtcattatgatagattcctttatccagcttaaacgttcatcaatggaagagaggtgaaaaccctttgaatcatggttacagaactatagaatttctaggtcttacttttaatctgacaaacattctgatgattactgtggcgagtgtgattgttttattgattgctatattgacgacaagaacgctttcgatccgtcccggaaaagcccagaactttatggaatggattgttgatttcgtccgcaatattattggcagtacaatggatttaaaaacaggggctaacttcttggcacttggtgtcacattgctgatgtacatatttgtgtcgaatatgctggggctgccgttctctattacaatcggacatgagctctggtggaagtctccgacagccgatcctgccattacattaacgctagccgtgatggttgttgctttaacccactactatggtgtgaagatgaaagggctcaaggaatattccaaagactatttaagacctgttccattcatgctcccgatgaaaatcatcgaagagtttgcgaatacgctgactctaggtttgcggctgtatggtaacatcttcgccggtgagattcttctcggcctgcttgcgggattagcaacaagccattattcgcaaagcgtggctctcggtcttgtcggtacaatcggtgccattctgccgatgctggcatggcaagcattcagtttatttattggtgctatccaggcatttatctttacaatgctgacgatggtgtacatgtctcataaaatcagtcatgatcattaaaacattatatccaaacggataacattttaaaggaggaactttttcatgaatttaatagcagctgcgattgcaattggtttaggcgcacttggtgcaggtattggtaacggtttgattgtttcacgtacggtagaggggattgcccgtcagccggaagcaggtaaagaactgagaactcttatgttcatgggtatcgcattagttgaagcccttcctattatcgctgtcgttatcgcattcttagcgttctttggctaagcataaaagccttatatgaactaaaaatggcgaagatcattccaagagaaccttcgccattgctttatgtctgataagcatcccgccttgccggctgaaaagagacaagtgcggctgctggatcagcaaagaaaaacctgcagaagggagttgccgtagtagatgtctcaattaccacttgaactaggattgtcgtttaacggcggagatatcctgttccaactgttagctatgttaatcttattagcgcttctgaagaaatacgctttagggccgctattaaacataatgaaacagcgtgaagaccacatcgctggagaaattacgtctgctgaagaaaaaaataaagaagcgcagcagctgattgaagagcagcgcgttcttttaaaagaagcaagacaggaatcccaaactcttatcgaaaacgcaaagaaactgggagagaagcaaaaagaagagattattcaggctgcacgtgcagaatctgaacgtctgaaagaagcagcaagaactgaaatcgtgaaggaaaaggaacaggcggtttctgctctccgtgagcaagtagcgtctctttctgtcatgattgcgtcgaaagtgatcgaaaaagaactggatgaacaagcgcaagagaaattgatccaggactatcttaaagaggtaggagaaagccgatgagtggatcagctgtctctaaacgatatgcatcagctctttttgatatagccaatgagtccgctcagctgaatcaagtagaagaagagctaattgttgtaaaacaagtatttcaaaatgaaaaagcgcttaatgatgtgttgaaccatccgaaggtgccggctgcgaagaaaaaagagctgattcaaaatgcatttggctctttgtcacagtccgtactcaatacgatttttcttttgattgaccgccatcgtgccgcgattgtccctgagctcacagatgagtttatcaaactcgcaaatgtggcccgtcaaacagaagacgcaatcgtatattcagtgaaaccgctgacggatgcagaaatgttaccattatcacaagtgtttgcaaaaaaagccggagtcgcttcactgagaatcagaaatgaagtgcagacggatttaataggcggtattaaagtccgcattggaaaccggatttatgacggcagcgtaagcgggaagcttcagcgcattgaacgtcaattagccggggaaaatcgatagaaggggtgaaacctaagtgagcatcaaagctgaagagattagcacgctgataaaacagcaaatacaaaattatcaatctgatattgaagttcaagacgtaggtacagtcatccaagtcggtgacggtattgcacgtgtgcacggccttgacaactgtatggccggtgaacttgtcgaattttcaaacggtgttttgggtatggctcaaaaccttgaggaatcaaacgtaggtatcgtcatcttaggacctttcagtgagatccgtgagggagacgaagtaaaaagaacaggccgcatcatggaggttcctgttggtgaagagttaatcggccgtattgtaaacccgctaggccagccggttgacggactaggcccgattctgacaagcaaaactcgtccgatcgaaagccctgcaccaggcgttatggaccgtaaatccgttcatgaaccgcttcaaaccggtatcaaagcgatcgatgcactgattccaatcggccgcggccagcgtgagctgatcatcggtgaccgtcaaacaggtaaaacatctgttgcgatcgatgcgatcctgaaccaaaaagaccaagacatgatctgtgtatatgttgcgatcggccaaaaagaatcaacagtccgcggcgtagtagaaacattgcgtaaacacggcgcgcttgattatacaattgttgtaacggcgtctgcgtcacagccggcaccgcttctgtacctggcaccgtatgctggggttacaatggcagaagaatttatgtacaacggcaagcacgttcttgttgtatacgatgatctttctaaacaagcggccgcttaccgtgagctgtccttgcttcttcgccgtccgccaggccgtgaagcgttccctggggatgtattctatcttcattcccgtctgcttgagcgtgcagcaaagcttagcgacgcgaaaggcgcaggatcaattacagctctgccgttcgtagaaacacaagccggagatatctctgcttatattccgacgaacgtcatttccatcaccgacggacagatcttcctgcaatctgatttgttcttctcaggcgtacgtccagcgatcaatgccggattgtctgtatcccgtgtcggcggctcagcgcaaatcaaagcgatgaaaaaagtatcaggtactttgcgtcttgaccttgcgtcataccgtgagctggaagcattcgctcaattcggttctgacctcgaccaagcgactcaggcaaaactgaaccgcggtgcgcgtacagttgaagtgctgaagcaggatctgaacaagccgcttccggttgaaaagcaagtagctattctttatgcgctgacaaaaggatatctcgatgatattcctgtggcggatatcagacgttttgaagaagagtactacatgtaccttgaccaaaaccataaagacctgcttgacggaattgcgaaaacaggaaaccttcctgctgatgaagacttcaaagctgcaatcgaaggcttcaaacgcacatttgcaccaagcaactaactcgaatgctgatgagagaaaaaggttctctttttctctctttttacgcagatgaagagaaaaggtggtgaaatctttggcctcattacgcgatattaagtcaaggatcacgtcaacgaaaaaaacaagtcagattacaaaagccatgcagatggtatctgcggctaagctgaatcgtgctgaaaacaatgcaaaatcatttgtgccatatatggataaaatccaagaggttgtgtcaaacgtcggaagagtttccggcaacgtgaagcacccgatgcttctcagcagagaagtgaaaaaaacggcataccttgtcattacgtctgaccgcggtcttgccggcgcttttaacagttcggttttacggagtgcttatcaggccatgcaagaacgtcatcagtctaaggatgagtatgcggtgattgccatcggaagagtgggccgtgatttctttaagaaacgggagattccgatcatttccgagttaacaggacttggagatgaagtaacgtttacagaaattaaagatcttgcccgtcaaacgattcaaatgtttatagacggtgcgtttgatgaattgcaccttgtttataaccattttgtcagcgccattactcaagaagtaacggagaaaaaacttctgccgttatctgatttgggcagcggcggcggaaaaagaacggcgtcttatgaatttgaaccatctgaagaggaggttctggaggttttgcttcctcaatatgcagaaagcttaatcttcggtgcgcttcttgacagtaaagcaagtgagcacgctgcaagaatgacggcgatgaaaaacgcgacagacaacgcgaaggaacttatcgattcactttcgctttcttacaaccgcgctcgccaagcagccatcacacaagaaattacggaaattgtcggcggagcagccgctttagaatagaaagattttgtcaggagggatagcgatgaagaaaggacgcgttagccaggtattaggaccggtcgtcgacgtgcgttttgaagacggtcacttgcctgaaatttataatgcgattaaaatttcacagccagctgcaagtgaaaacgaagtaggtattgatttaacgcttgaggtcgctcttcatttaggtgatgatacagtccgtacaatcgcaatggcatctacagatggtgttcagcgcggtatggaagctgtagatacaggagcgccaatctcagtaccggttggtgatgtaacacttggacgtgtatttaacgttctcggagaaaatattgatttgaatgagccggttcctgcggatgcgaaaaaggatccgattcacagacaggcgccttcattcgatcagctttcaacagaagttgaaattcttgaaacaggtattaaagttgttgatttgcttgctccttacattaagggcggtaaaatcggattgttcggtggtgccggtgtaggtaaaaccgtattaatccaggaattaatcaacaacatcgcgcaagagcacggcggtatctctgtattcgccggcgtaggagagcgtactcgtgaagggaacgaccttttctacgaaatgagtgactctggcgtaatcaacaaaacagccatggtattcggacaaatgaacgagccgccgggcgcacgtatgcgtgttgctttgacaggccttacaatggctgagcacttccgtgatgtacaaggacaggacgtactgttcttcatcgataacattttccgtttcacacaagcgggttcagaggtttcagcccttcttggccgtatgccttcagcggttggttatcagccgacgcttgcaactgagatgggtcagctccaagagcgtatcacgtctacgaacgttggatcagttacatctatccaggcgatctacgtgcctgccgatgactacactgacccggcgccggcgacaacgttcgctcacttggatgcgacaacaaaccttgagcgtaaattaactgaaatgggtatttaccctgcggttgatccgttggcatctacatcacgcgcccttgctcctgaaattgttggagaagagcactatgcggttgcgcgtgaagtacagtcaacgcttcagcgttacaaagagcttcaggatatcattgcgattctcggtatggatgaattaggcgaggaagacaaacttgtcgttcaccgcgcacgtcgtatccagttcttcctttctcagaacttccacgtggctgaacagttcactggacaaaaaggttcttacgtgcctgtaaaagagacggtacaaggcttcaaagaaatcttagccggtaaatatgaccatcttccagaagatgcattccgtcttgtaggccgtatcgaagaagttgttgagaaagcaaaagaaatgggtgtagaagtttaatctggtcctaggagggtaaaagcatgaagaccgttaaagtcaatatcgttactcccgacggcccagtatacgatgcggatatcgaaatggtgagtgtgagagccgaaagcggcgatctcggtattttgccaggccatattccaaccgtggctcctcttaaaatcggcgctgtccgtctgaaaaaagacgggcagactgaaatggttgccgtcagcggcggttttgtagaagtccgtcctgatcatgtcaccatccttgcccaggctgccgagacagcggaaggcatcgataaagagcgcgctgaagctgcacgccagcgggcgcaggagcgtttgaattctcaatcagatgatactgacattcgtcgggctgagcttgcgttacagcgggctttgaacagattggatgtagcagggaaataagaaaaaatccttctctttatgagaaggatttttttatgaacgcacaagagaatcaaacagcgacagcaacgggcgatcctcttttggacgcaggtataaaccatcacaggcattcattgtatgccacgatttgcgatgtcttctaaagccaagtgtataagcgccgtctttatagggataaggttttacaacccattcagcatcttcatggcgggcaatcacacaatctataagataaacactgatcattttctcgaattcttcaataggaagattccaatcagcaagcaaaagttcttgtatactttgaaaatagaggttttcaagctcttcaaggctttctctcgtataggtaagagaaatgttaaaaaactgacacaattcattcagttcttcaatctgtgactgtctataatcataatagaatgcaattgcttcccattcctgatcaaaaattggcaggtcctcaccatattgcttttcaggctgaaaaaaagaatgattcacatttgccagctcctttccaataaagtataccatgtaaaagaatcgcactttaagcggggattagccctagatttggctgattattccgttctgtataaaatgtatcatctttatctgtgcttcttatataataagaaagggtatgaacgcagagaaaggagtgtaatagatgagtgtattgggacagcaggctgcaatcggcattgtcgttcacctgatttttatagcagtgacttggtgggcgttgcaagccgtcaatatagatccgttaatcaaaaaaggcaaagtcgtgcaggcaagactcctgatgattttgctgacaatcgccattggaacggccgttgccaatttctttttagattacctcaattattcacagcagcttccctatctattttaataggttttgaacattattaaatggttgggagaagcgggttgaagcgaatagctcgagttttgacgaagatttttacgtatggcgcctcttgcctccggtaaaactggggataagggggagagatgaacatgaagaaaaaacaagtaagccacgctattatcatttccgtcatgttaagcttcgtcattgctgttttccataccattcatgcgagtgaattaacgccgttagcacagatggcagaggggatggaacgtcaagatgtgtcaatagataagtggacattgcatgcaaaacaaaacttgtcactgaccgaaaaagaattttatcaaaaagtgcaacgtttaaaacaagagtatcgtcaatatgattgggtgattgcacgggaagataaaatgataaaggcaattggcacatatactgacaaaaaaaatcgtacttcttttagactgcagcttgtcacaaccctcaaaaaacacaatccaacttcgtatttattatatgagcaaatgagtctagagacaccggatagctggaatgatacatatgaacagtttgaacgggagacacttgggatattccaagaaaaagtagttatttttacttgtctaaatggtcacttagatgataatatgaatattgttttgcaaaaaaaagcaaatcagttattaaatgaatttcaagcaagatcagtagaacatgtagttgagccaaatttcgtttctatttctgcgtttacagatgagtgggaagagtacattatgacctcgaaacataaaatgaatttgcaaattgcacttagaagtgcaggaatgggcggaaaacataccgttacggttggcacaccaatcgttacgactgaatattaatatagagaatttagggacgcggaggggaataccttggaaaaaatcatcgtccgcggcggtcagaagttaaacggcacagtcaaagttgaaggcgctaaaaatgccgttttacctgttatcgctgcatctttattagcaagtgaagaaaaaagcgtaatttgtgatgtacctacgctctccgatgtatatacaattaacgaagtgttgcgtcatttaggagcagatgtgcattttgaaaataatgaagtgactgtaaatgcttcatacgctttgcaaactgaagcaccttttgaatatgttcgtaaaatgcgtgcgtctgtgcttgtcatggggccgcttcttgcgcgtacaggtcatgcaagagttgcacttccgggcggatgcgcaattggttccagaccgattgatcagcatttaaaaggttttgaagcaatgggcgcagaaatcaaagtcggtaatggcttcattgaagctgaagtaaaaggccgactgcaaggcgcaaaaatttatctggacttcccaagtgtaggagctacagagaacctgattatggcagccgctctagctgaaggaacaacaacgctggaaaacgtggcaaaagaacccgaaatcgttgatttagcaaactatatcaacggcatgggcggaaaaatccgcggagctggcaccggcaccatcaaaattgaaggagtcgaaaagcttcacggcgtaaaacaccatattattcctgaccgtattgaagcgggcacatttatggttgctgctgcaatcactgaaggaaacgtattagtaaaaggagcggttcctgagcacctcacctctttaattgcaaaaatggaagagatgggtgtaacaattaaggatgaaggtgaaggtctgcgtgtcatcggcccgaaagagcttaaaccgattgacatcaaaacaatgcctcacccgggcttcccgactgatatgcagtcacaaatgatggcgcttctgcttcgtgcaagcggcacaagcatgattacagaaaccgtttttgaaaaccgttttatgcatgcggaagaattccgccgtatgaatggtgatatcaagattgaaggacgttctgtcatcattaacggtcctgtacagcttcagggagctgaagttgcagcgactgatttgcgtgcaggtgcagcgctgattcttgcggggttagtggctgaaggtcacacacgtgttactgaattgaagcacttagaccgcggttacgttgatttccatcagaagcttgccgctctgggcgcagacatcgaacgtgtaaatgatgagtctgcttctgagcaagagaataaagaagtcgtttctgacttaaatgcataaacttacttgaaaatcagtatgtcactctggcatactggttttttattttttgtgtattatcatcattatgcgcaaaatagcaaaaaagaatacgtaaatgacaaataaagtttctgtccaaaacgagagtcatattagcttgtccctgcccatagactagactagagtcgaatcccgagcaggaggcagctgaatatgaaacaattcgcaatcacactatccgtactatgtgcattgattctcttggttcccacactcttggttataccattccagcataataaggaagcgggggccagcgtagaatcagaaaagacagcagtcagcacgaaaccagcatcgaaaggagcagaaacattgaaagcatcacctgtttctattcccgtctatcgaaccgcaaatcaatccgtagaaaacattccgcttgaagagtatgtgattggagtcgtcgcctccgaaatgccggcaacctttaaacctgaagcgctgaaagcccaggcgcttgccgccagaacatttattgtcagactgatggtgtcaaattcagcggtagaagctcctaaaggctcactggtggatgatacacagatgttccaggtgtataaaagcaaagcggagctgaaaaaacagtggggcacaagctatgagacaaaactgaagaaaatcacagatgcggtagccagtacgcaaggcaaaatcttaacgtacaacaaccagccgattgaagcatcctttttctccacaagcaacggctacacagagaatgcagaagcttattggacaagtgctatcccatatttaaaaagcgtcaaaagcccatgggataaaaagtctccgaaatataaggcaacgaaaacctttacagcggcagaatttcagcaaaagcttggcgtcaagctggatggatctagcgcagtagggaagattaccggcgagacaccgggccaccaggtcgcaactgccgtcattaacggcaagacgctgaaaggaagagacatacgtgaaaagttgggtctcaactccgccgattttgaatggaagcgaaatggagacacaattacagtcacgacgagaggatttggccacggtgtggggatgagccaatacggagcgaattttatggccaaagaaggcaaaacggttgatgacattgtaaagtactattaccaaggcacacaaatttctgaggcagatgcgtttttgaataaatatatggcgaaaaagtagaaaaagacgctcattgggcgtctttttctgttcctgaatatcttttatctaagagtagctgaaacggtttagaggagcttctgaccgtctttaaggatcagtccttttttcctgatttcaggctttgagattgtggtaaagtcatccacatttgtcgacagacttcgacagactcatataacgaaagccgaaaggcggacaatcttctcttttcataggggcgttaggtggaaatcactaataaaaacataggtttctatgcaaaagtaaacaacagcaatggggaagcccgccctatttatttctcggtttttgttgattacgatagattatgttcagcgttgaacatctgcacgcagaaacaaattggtaaaggggtacgaacatgaagaaaagattttcactgatcatgatgacaggattgctttttggattaacttcacctgcttttgcagctgaaaagacagaaacggaggctaaagcgccggcgaacgtggcggtcttgcttgatgccagcggaagtatggcgaaaagaatagatggtgtatctaaatttaattcagccaaaaaagaaatttcaaagtttgcgagctcattgccagaaggaactcaggtgaaaatgagcgtgtttggctctgaaggaaacaataaaaattccggaaaagttcagtcatgtgaagccattcgcaacgtatacggcttccaaagctttaacgagcaaagcttcctcaattctctcaatacaattgggccgactggctggacgccaattgccaaagcgctgaacgaggcgaaatcttcttttgaccagcttgatgcaaaaggggaaaaagtggtgtatctgttgacagacggtgaggaaacgtgcggaggaaacccgattaaaacagcaaaggaactgcaaaaagacaatatcactgttaatgtgatcggctttgattataaagagggatacaaaggccagctgaacgcaattgcgaaagtaggcggcggtgaatacttcccggcttatacccaaaaagatgttgagaaaattttcactcagcaatcactaatgttatctaaataagaaaaaagaggctggtgatggtcagcctctttttgtatgtaacaaaaacttcaaaactaattagctgtctgcctgtagcatagtagcagatttccgtttttctgtcataatcaaggcgaaaaaagaatgaatgatcacacaagctgtttatgctttctgggcggaaatggctaaaaatgaacggcatttcaagcgattttggacagatcgtgaaagcagcacaaaaggcagcatgtcctatatctttttgcattttcgtattctagcataaagaagaatccaacatatagttggaaaatatgaaaaagaaaggaagtaatcatatgaaaaaattgctggctgccggtatcattggattgttgactgtttccattgcctccccgtcttttgccgctgagaaacaggctgatacaaatgtagctgttttgtttgacggaagcggaagcatggttcaaaaaacaggaggagagcgcaaaatagacattgccaaaaaatcagtaaaatcttttgccgaacttcttccaaaggatacaaatcttatgcttcgcgttttcgggcatgcagggaacaataaactgtccggtaaagccctttcgtgcagtacgacggaaaccatttacggccttcatccatatgaagggtctctgtttgacaattcattgagtgagctcaagccgactggatggacaccgattgccaaagcacttgcagacacaagaaaagaatttgaagcatttgacgcagacgggaaaaacgtggtgtatttaatcactgacggtgaagaaacgtgcggcggagaccctgcggcggaaatcgaaaagctccgtgcatcaaatgtggatacgattgtaaacatcattggcttcaactttgatgtcaagggtaatgaagagatgaaacaagcagctgtcgctggcggcggagaatatatttcagcgaacagtgcggatgagttcgaacaggcttgggaaaaagaagcacaaaaatttactgagtaaggaacctaaagatcaggcgctcccccaggcgccttttttattggtttaaaaacagtttgggcgggaatgataccctaaaaaggggttgaacatatgaaattattcggaatgatttttcttatagccaccgttgcatttatattgcttggtgttcttctaaaactggcagccttcttttttgtcagcattctcaccttgatcgcagctattgtgctgtttacggttctgaaaaagaatcagcataatcaaacatagagtcctttatacagaggtgtctcagcgtgtcgacaaaccccgcgttcgttgtcaatgcacattggtgctcacgtgttataaaaggaacggcggctaaatgcttaggcgtcctgcctaaacaccgccgtcatcacatcctgtaaaagccctttatatagagggctctttttgtgtctcagaattcgacaaaatccgaggagtgtgaaaaaatataaaggcaggaacattgcggaggggaagagacattgaacgataaagtaactgcggtcagggatgtatggcgctatgaacaaggggaaataagcaaagtagaagaccggatggtgacggaattccctttgacagtgatactgaatggcagtgaatttgtgacgctcgtttgtacgcctgagcatatcgaagagcttgtcatcggatttctcgcatcagagggtgttatacgatttcaaaaagaaattaaaaggtttacaatagatgaaagtctcggttttgtatatgtcgacctcgttcaccctgagacattggatcaaaaggattatacgaaacgggtgatcggctcatgctgcggaaagggccgtcatttttattttcagcaggatgtcaaaacagccaagacggctgtcagccaaatcaagatatcgcctgaggcatgtctggcgcttatgaaagacatgcagcaagggagcgggacgtttcaggatacgggaggcgtccataatgcggcgctttgcgacacagagaagcttctgttgatgcgcacagatatcggtcggcacaacgcacttgataaactatacggacactgccttctaaacgggatgtccgtacgcgacaaactgattgtgttcagcggcagaatctcatcagaggtcctgttaaaagcggccaaaatcggcgtgtcgattgtcatttccaaatcggccccgacggagcttgcgattcaaatggctgaagaattgaatatcacagcgattggatttgtcagaaacggatcatttaatgtatatacacaccctgagagaatcagggagtaggaaggggctgtagctatgattacagagtcgcgtcagatgttggataaaagaaacagaccgctgagagaccttcgcatttctgttacagaccgctgcaacttccgatgcacgtactgtatgcccgccgaattattcggcccggattatccttttttaaagaaagaggagctgctttcatttgaggagctggaacggcttgcgacattgtttgtcacaagatttggcgttgaaaaaatccgcttgaccggcggagagcccctcatgagaaaggatatgccggaattaatcaaaaaactggcccgcataccgggtattcgtgacatcgcgatgacgacaaacggatcactgctgcctgtttatgctaagaggctcaaggaggctgggctgaaaagggttacgatcagccttgattctttagaagacgagcgttttaagaagataaacgggcgcggtgtttctgtcagcaaggtgctggaaggcattgaagcggcgaagcaagcggggctcggtgttaaaatcaatatggtcgttcaaaagggcgtcaatgaaaaagatatactgcctatggcccgttattttaaagaaaaagggcatatcctgagattcattgaatttatggacgtaggcaacaccaaccaatgggaaaagaaagacgtcatgacaaaggcggaaatcatagatttgatcaataaacacatgccggttgagccgatagcgcctaattatataggcgaagtggcttccagattccgctacttggacggctccggagaaattggcgtcatatcatctgtatctgatgcattctgcggatcttgcaacagagcccgtctttctgcgagaggagagctgtttacctgcttattcgcttcaagcggatttgacctcagagctccggttcgccaggaattaagtgatgacgaactatcagaaatgatcgggacagtatggaaaaatcggatcgatcagtattcagtcgatcgtacgctatcaaaagcatctggcaaaaagaaagtggaaatgtcttatattggcggttaatttgaagtcaaaagcttatcggcactgtccggtaagcttttttattagaatccgagtgcaaaaaatacgtagaaaaaccgaaatatataaggataggcataaagaaggaatcattgtaagaaaatttaattccaaagccatacattatgataaaatataaccaattagaaaatagaaagggttggaggggcatggccgcgtacgagatcccgtcatctcaagtaggagtgaaaatcaataagtggtataagcacattttagcatttcaagtggctgatgccgtaaaactgaaagaagaaattgatctagatatcgaacagatggaagaggatcagctgcttctcctgtattatcagctgatcagctaccggcaccaaattatgctggattatgtaaagcctgacctgcacgaggaatctcagcttcaatatcgtgaattgatcaaaacgctggaaagcaatcaggacagcatctccggattatctgagtattattttcacttgtttagaggaatgtacgaatttgaacagaacaattacatctcggctatatccttttatcggaaagctgagaagatgcttgcgtttgtagaagatgaaattgaaagagcggaatttcattttaaagtggcggaagtcttttatattatgaagcagacgcacttttccatgaaccatgccgtacaggcgctggagacgtataaggctcacgatttttacagagtcagaagaattcaatgccatttcgtcatatcaggaaactacattgactacagaaattatgaaaaagcgcttgaacatttagatgacgcgtatcgccttgctttattggaaggacagccccgtttgatcggatcagccctttataatattggtaattgctatgatgacaagggggagctggatcaggccgccgaatactttgaaaaagcgcttcctgtcttcgaggattatcagctggaacagcttccaaaagcgctcttcagcctgactcgcgttcttttcaaaaaacaagatagcgaagccgcgatacggtactatgaaaaagggattgccattgcccaaaaacgaaacgacttcttcagtctggcaaaatataaatttctgcaggcattatatgtggaatctgtcaatttgaatatgattcaagaagtatttgattatatggaagaaaagggcctgtatgtatatattgaagaatttgctttagatgctgcctcttatttcagtcatcgcgaacaatataaagaagcggtgtatttttatgaaaaagcggtcagcatgagagagatgattcaaaggaacgattgtttatatgaagtatgagacaaaaccatctgctggcagatggtttttttttatgcaaaaaaaggggagcatcggaacgtttatttccggggagaacaggaaaaatcgctacagcactgttttttgaacaaaagccgttttgggatgcagatatgcatgtgagggggaattcaatgtttggttttaatgatatggtgaagtttctgtggtctttcctcattgttctgccgcttgtacagattatacatgtttcagggcacagctttatggcttttatttttggcggaaagggatcgttggatataggcatgggaaaaacgctgcttaaaattggacccatacggttcagaacgatttattttatcgattctttttgccggtacggggagttgaaaattgacaatcgattctcaaatgcactcgtgtatgcagggggctgcttgtttaacctcatcacgatttttgcaatcaatctgctgattatacacagtgtattaaagccgaatgtgtttttctatcagtttgtctatttttctacgtattatgtgttttttgccctgctgccggtccgatattcggagaaaaagtcatcagacgggctggcgatatacaaggtgctccgttacggagagcgctacgaaatcgataaataacattagaatgtttattgcctctcagatcgggaagttaacaagtacacacataattgagaggggagaattaacatgggtaacgatagtgtaaaagacaaaatgaagggcggcttcaataaagccaaaggagaagtgaaggataaagtcggagatatggctgacagaacggacatgcaggctgaaggcaaaaaagataaggcaaaaggcgaaatccaaaaggatatcgggaaagccaaggataaattttcagataaagattaatcgtacggaagaggcaggaaacgaaatgtttcttgtcttttttttttcgctttttctgatgtgaataaatataacaaaaaaagaagctgatttggtcaaggtaactaaattttttaaatattctttgaattaataggcctcttctatataatgatgacataagttgtaaacttttataacatcatttgaagaaatcaaacaaaggggttttgatgacggaatgtactgcaccgaagaaagtgtcggaagccacgggagtgcgagaaaacagttgatatcgacacaagcggggattcagtgaaggccggaattcttcactcattaagaggaacggtggcgatcagcgaagtgaccgtccatgatgcggagttaatggcaatagtcgggttctcggtatcgtggaggtcggcgcctcagactggcctccatgccatgcttccggttgcggagcaaaacaacgggctgccatcaggaatgtaacgtctggttatgatcaatcgatggttttgcacagccttagcttcgcccggggcagattgtcgctgtattaggccgactccggctaaacagagggggctatttgttttaatcaaacgtttgttcaaaacgaaaaggcggtcaacagcagcagcttgcaatcaccagagcgctgatggtaaatctgaaaaatattttacttaataaacaattggaaggaattcagattttaattgtcgaactagtcagacaagttattatagaaatttccagaaaaaaagacatttgttatcttagtcgagcgcagtctggaaaacgcgttaatctgatctttccgtgatcgacaggggaacggttgttgaccatggcaaggctgatgaagaaacggcatgccgctttgaaaggcatcttaccgtatgacccccattctcgaagaaagggaggtgatgtcccgcctgactgttccgcaaattcgtagtagccgcatctgctttatatgacaaaagaaggaggactacagatgaaactgacaccagttgaacaagagaaattgctcatttttgcagcgggggaattagccaaacagcgaaaggcgcggggcgttctgctgaactatcctgaggctgctgcttatatcacctgctttattatggaaggcgcacgtgatgggaagggagtagcagagctgatggaagccggccgccatgtattaacggaaaaagatgtgatggagggtgtgcctgagatgctggacagcattcaggtggaggccacatttccggatggtgtaaagcttgttacggtacatcagccaatttctgcggaggtgaagtcatgaagccgggagcatttcaaattgctgagggaaccattacgattaatgaaggccgtgagatacgggaggtaacggtaaaaaacaccggatcacgctccattcaagtcggttcgcattttcattttgcggaggccaacggggctttattatttgaccgtgagctggcgatcggcatgcgtcttgatgttccatcaggcacgtcggtccgttttgagccgggagagcagaaaacggtctcactagtggaaatcagaggacgcaagacaattagagggctgaacggaatggccgacacgtttatcgatgaacgcggcaaagaaaaaacgttggccaacttaaaacaagccggctggatggagggtgtaatccgatgaaaatgtcacgggaggaatatgcggaactgtttggcccgacaacgggcgataaaatcagattgggcgacacggatttatggatcgaagtcgaaaaggatttcacagtatacggtgaagaaatgatctttggcggcggaaaaactatccgagacggcatgggccaaaacggcagaatcacagggaaggacggcgctttggatttggttatcaccaacgtcgtgctattggattacacaggcattgtcaaagcggatgtcggtgtgaaagacggccggattgtcggtgtcggaaaaagcggaaatcctgatatcatggatggagtcgatccgcacatggtcatcggagcggggacagaggtgatttccggtgaaggcaaaattttaacagccgggggagtggacacgcacattcattttatttgtcctcagcagatggaagttgcgctttcttcaggtgtgacgacccttttgggaggcggaacaggacccgctacaggaagcaaagcgacaacatgtacgtccggggcgtggtatatggcgaggatgctggaagcggccgaggagtttccgatcaatgtcggcttcttaggaaaagggaatgcatccgataaagcgccgctgatcgagcaggtggaagcaggcgccatcggtcttaagctccatgaagactggggaacgacgccaagcgccattaaaacgtgtatggaagtcgtggacgaggctgatattcaagttgccatccataccgatacgattaacgaagcgggctttttggaaaacacgctcgacgcgatcggggaccgggttattcatacttatcacattgaaggggcaggcggcggtcacgctccggatattatgaagctcgcctcttacgcgaacattctgccgtcatctacaacgccaaccattccttataccgttaatacgatggatgagcatcttgacatgatgatggtctgccaccatttagatgcgaaagtgcctgaagatgtggcattcagccattccagaatcagggcggcgacgattgccgcggaggatattctccatgatataggtgcgatcagcatgacatcatcggattcccaagcgatggggcgggtcggtgaagtgatcatccgaacatggcaggtagccgataaaatgaaaaaacagcgcggcgctcttgccggtgaaaacgggaatgacaatgtgcgcgcaaaacggtacattgccaaatacacgattaatccggcaattacgcacgggctcagccatgaggtcggctcggtggaaaaagggaagcttgctgatctcgttctgtgggacccggtatttttcggcgtgaaaccggaactggtcttaaagggcggcatgattgcacgtgcgcaaatgggagatccgaacgcgtccatcccgactcctgaaccggttttcatgcgccaaatgtatgcgtcttacggaaaagccaaccgctcaacctcgattacatttatgtctcaggcaagcatagagcgtggtgtggcggaaagcttagggctggaaaaaaggatttctccagtcaaaaatatcagaaagctgagcaagctggatatgaagctgaattcggctttgccgaagattgagattgatccaaaaacctatcaggtctttgctgacggggaggaattgtcttgccagcctgtcgattatgtcccacttggacaaagatatttcttattttgataagacgcggccggagtgcatccggccgttctattgactaaaaacggtgcacaaaacccatgtatttagtgtatattagatgttgacaaacgaatcaaatgtaactattatagttacaacggtggtgaaaaaacatgattaacagccgtcttgctgttgccattcatattttatccctcatctcgatggatgaaaaaacatcttcagaaatcattgcagacagtgtcaacacgaatccggtagttgtgcgaagaatgatcagcctgctgaaaaaagctgatattctcacatcacgcgccggggtgccgggtgcaagcctcaaaaaagatcctgctgatatttctcttttagaagtgtaccgggctgtccaaaagcaagaagaactctttgcggttcatgaaaacccgaatccgaaatgtccggtagggaaaaaaattcagaacgctctggatgaaacgtttgaaagtgtgcaaagagcgatggaaaatgaactggcaagcaagtcattaaaagatgttatgaatcatctcttttaatcaaaagggatgacttctaaccgctaacatgtaactaaaattgttacaaataaggaggaaatgaaaaatgaaaattggtattataggcgcaagcgggaaagcgggaaacgagattttgaaagaagcgaaaaaaagaggccatgaagtgacagccatcgtcagaaacgcttcaaaagtgcaggagcaagacgtagcgattttggaaaaagatgtgtttgaactgactgcggaagacatcaagcctttcgacgcggtcgtaaacgcttttggagcagcacccggccaagaacatcttcatgttgaagcaggaagagcactcatcagcattttaaaggacgcgaagcacacaagattgcttgttgttggcggagcgggaagcctgtttgttgatgaagccaaaacaacccgtttaatggatacgccggaatttccgaaagaatatttgccaactgcatcaaatcaaggcgagaacctgaaagatttgcagcagacagactccatttcctggacgttcctcagtcctgcggcattttttgatccagcaggaaaacggactggctcttaccaaaaaggaaaagacaatgtcatcgtaaatgcaaaaggagacagctatatcagctatgcagattatgccattgccgtgttggacgagcttgaacatcccgaacacaaaaatgaacgcttcacagtggtaagcgaagcggaataataaaaaacccggagccagctccgggtttttctcattaataagtgctgtacgtatcgctgaaaaggccgtcagcaatcccaagcattaaaaagatgaagaaggcgataatcgcaagaatggatacagcaatgcttacgatcaaataaatcccttgcatctttacgaatttcgcgtaattctccagcattaagtcttcagactgtccgctattgtgttcagccatttggcctgcttccctagctgacctcatcaaaaagataccggaaataatttgcagtacgcctggcacggcaccgattagaaaaaagaacgcgcctgaaagcgcggtaattgcgcccataataataaataaaatgcctgtagcttttccccatttcgaaatgctgatgagggttttgttcattgtttcaggattcatgtatactggctcccctttacaaaaaaatactcacttttcttttatacactatttgtgagaagttttgtatatagaaaataacattttggggattgaccctaacgttgcgtgattgtttacgataaaaaagaggaggtgttatgtatgaaatatcaagttaaacaagtggcggagatatcaggcgttagcattcggacgcttcatcactatgacaatattgagcttctgaatccttcagcgcttactgatgctgggtatcgtttgtacagtgacgcagacctggaaagactgcaacagattttatttttcaaggaaatcgggtttcgtctggatgagattaaagagatgctggatcatccgaattttgaccggaaagcggcacttcagtcgcaaaaggagatattgatgaagaaaaaacaaagaatggatgagatgattcaaacaattgacaggacgcttttgtccgttgatggaggggaaacgatgaataagagggatttatttgccggattaagcatgaaagacattgaagagcaccagcagacatacgctgatgaagtcagaaagctgtatggaaaggaaatcgcagaagaaacagagaaaaggacatctgcatactcggcagatgattggcgcacgatcatggctgaatttgattcgatttacagacgaattgcggcgcgaatgaagcatgggcccgatgatgcagagattcaggccgctgtgggggcatttcgcgatcatatttgccaatatcattacgattgcacactcgacattttcagaggactcggggaagtgtatatcactgacgagcgatttaccgattcaatcaatcaatatggagaaggtcttgccgcttttttgcgggaggcaatcatcatttactgtgaccatcaggaaaacccccggccgtaaaggccgggggtttacgcatcttataagatcggcgacaacagccgcgagacggattcttttattcgaatccacaacgggcgctgcagatactcctcataggtgaattttctggatactagcaaatcttctttaaaagttgaaaccagttttttagcaatggtgatatcgtaaataaatgcattaacctcaaaattcagcctgaagcttcggacatcaatgttcgctgtgccgactgaagcgatttcgtcatccaccacgatggttttcgcgtgaataaagccgttatcgtaaatatagacagtggctccggctttcagcagatcgccgatatacgaaagtgtcgcccagtatacaaaggcgtgatcgggcttgttcggaatcataatgttaacgtcaatgcccgaaaggcaagcgatccttaaagcatccagcaggcttgcatctgggataaaataaggtgtttgtatcaaaatggaacgcttggcgttcgaaatcattttgatgtagccatttttaatttgttcccattccgaatcagggccgcttgtgacaatctgcatcccgacgttgccttttgggccgtaatcaggaaagtgatttggaatatatgtcagcgtatggtgatgagaagcttggttccagtcaaggatgaatcgtgtttggatggcgtgcacggccgttccttgcagccggatatgcgtatcccgccaataaccgaatttcggattaagccctagatactcatctccgacgttaaagcctccgacataaccggtcataccgtctatgatcacaagctttcgatggttccggtaattcagccgcaggttaatcggcctgagctttgacgggaaaaagacctccacatgcccgccagcctcgcgaagctctttaaaaaacttttttctcagcgttctggacccgagttcatcataaagcactctgacctgaacaccttctttcgccttttggatgagagcgtcccgcaattttttgcctaattcatcgcctttataaatataatactgtaaatggatatgatccttagcctttgaaatgtcactcagcagccgctgaaatttatcccgtccatctgtaatgacgtcaactgaattatcctctgtaaacacagcatggttattcataatcagcatataaattaaatctttgttatcaaaggttgcccggttgttaaactgaaattgcttggtttctaaatcttcaagctgatgcttcagcagcctttcaattccaatctttttccggtcttcccattgaaacaaatgcttgcgtctgagattatggccgaataataagtataaaataaagcctaaaacgggaataaagaaaagaacaagcagccacgcccaagatgcactggcatcgcgccgttctttgaagatgacaatgatggccaaaagaatatttaaaatgaaaaaaagtgataaaaggatggaagaaatactcactttgtaaccccgctcattcatatttatcaagaagattgccattagtattccatgaataacagtgatctgattcccattacaaattataacactcacattttaaaagaataaagagcggcgatccagattcttcgtgaaaaatacgggcagatttctttaaaaccagcttgcacctgcgttaaaataaacacatatgataacgttcgtgaagcttgaaacatcaaataaagggggaggattatatgaacttttacagagtcgaacaaatgccggggttcatcaaaacagaaatgcaaaaaattcaaaaggccgtacagcctttcatgaaaaaaaccgtcatttaccgttttcttgctattccgcttgctgcattctctctctttaatttagctgcttttctatttcatgcttcagctgacagggagtccctgatcagcgcaggcatattcgcccttttggcggcgctcgggctcgcattttttaaagaggcaggctatcagcataaacaaatccaaaaaacggttcacatctatatgctgaacaggatcaaaaagagcgaaatcctttcagaagagcggaaaagctcctacgcacgacaaataaaggaagagccttttgcgatgcggagttttgttgaatttttgactgaggaagacagacgcaaaaaaatgtattaaagaagatctgcacccggattgttgagattttccagacgatccgggtgtgtttttttgcatgcagacacccgaaataaaaagtgcggtttcggattgattccgacttcatccgtttttttgatattcatttctgggtaacagcgttgctttgttgatttcctctactagagatgtctattgtatgcttgcttcaggatttggtgtttacgccggcctgctttgaatagtcaaataaaataggcatggttccgtttatatggaactcatgccctgtcctgtctcatcattattcaaacaccggatcatcctcataataataagaatccggatcatcatacgaaggcgtgttctcaaaagcagcaatgccgattaccaccagcacgaaaatggctacaatgatcccgatcaggacagtaacgatactggatgctgcataaaacagctgcatttttataaatgtcccgtaattttcaagcatgctttcgccagcgctgccggttagatttccttcggcttccgcggctgcttttgctgagcgcatcaaaaatacgcctgaaataatgagcagtacgcccgggatggcgccaatcactgtcatcaaaacagacagagtgacaagcgatcccataatgattaacaagatgccagaaattttgccccacttggcaatgtcggatagcgacttgacagcggaggcgctcagctggcggctctcctgtccaacaggtgcagtctcctgttcaacaaggctattttcttcattatgatgttcaatttcgttttcatctttatccagactaatcatgaaagctctctccctaaaatttttaaatcgtatcttttcccgtccatttcggcgatgccggggaatagtccccattctgcaaacccgtgcttttcaaacagcttcaggcttggtttattatgcccgaaaatgaaggccataagtgagcggatgccaagattcggggcaatgcggagcgcttcttgaagcaaatatgatccaacacctttgccgcggcatgcttcgtcaatgtatatgctgacttccgctgttttattataggctggccttccataaaatgtttcaaagctgatccaggcagcgacgtttccgttttcatcctcggccacatagagcggacgtgactctgtatgtcccgaaaaccattccatccggtcttcaggagttaccggttcggtatcggctgttaccattcgagaagcaatcgttgaattataaatcgccacaacagcctccaagtctctatgttcagcaagacgcaatgtcatgttcatacgtttttggcactcctctcaaaaaaatacatattttcgttcagtctgtgcaaactacatctaaaaaagtttttttggataggttgtatatattttcagaaaagtgttcagaatgttgctgaggtgatgaaacaatgagagaggaagaaaagaaaacttctcaagtcaaaaaacttcagcagttttttcgtaaacgctgggtgttccctgcaatttacttagtcagtgcggccgtcattttaacagctgtcctttggtatcaatcagtatcaaatgatgaggtaaaggatcagttggctgataacggcggaaactccgcatatgacaacaacgacgatgcagttgaagtaggaaagtcaatggaaaatgtcgcaatgccggttgttgattctgaaaacgtttctgttgtgaaaaagttctatgaaaccgatgccgcaaaagaagagaaagaagcagcactcgttacctataataacacgtacagcctaagcaaaggaattgacttagctgagaaagacggaaaagatttcgatgtctctgcttctctgagcggtacggttgttaaagctgaaaaagatccagtgctgggatatgttgtggaagtagaacatgccgacggtttatcgactgtgtatcaatctctttccgaagtaagcgtagagcaaggtgacaaagtaaaacaaaatcaagtgatcggaaaatctggcaagaacctttacagtgaagacagcggaaaccacgtgcactttgaaatccgtaaagatggggttgcaatgaatccgttaaactttatggacaaaccagtttcttctattgaaaaagctgccacccaagaaacagaagaatccattcagcaatcttccgagaaaaaggacggatcaactgaaaaaggaacagaagaaaaatccggtgagaaaaaggatgattcaactgacaaatctggttctaaagaaagcagcacaacagaagacactgaacagtcttaatgaagaaaacgtctatccttgtgatgggcgtttttttctgttactttttgctttgttttaccgtctatgtagttacatgtaggcacgtacgttataaaggaggttatgtcatgaaccgcctattgctcgcaggctggatcttttttatcctgctttctgtctgtacggaaagcttcagcggcatggtcgtatcgcaaacggtggcttttcattttcagccgcaccctgatctgtctcaatttttagttatggattttactgagcttactgtacctgaagcgtttattcaaaaaatcggacacgcgttttccttctttgtgctgacatatttgctgtggaaacagcggggcagcataagatcagctgcagccggctcatttgcgtttgcttttttcacagaagttcttcagctcttcttcagcaggaatggttgtatccgggatgtgctcatcgatgctgttggaattgggttgttttatggtttatatgtgttggcgaagcgaagaaaacaagagatgtatgagaaatattaaagccggctgtcttgatttcagacgccggcttttgtctttcttagaaattttgatcggttggttttttcgtcagtttattgataatggcttcgtagatcctcacgaccaaatcgacgaacgggcgaagcagatctgaaaatctaaagaaaaggaacccgataatgatggcgacaacgaggctgcccaatacatctaccggatagtgatgtcccacccaaattctcgaaaagcctgtcaaaagcccaaaaatgacaagcggccagccgattttgcggtttctgaaaagcatcgcaatagaaatcgctaatgcacctgtcgtatggtcacttggaaatgaagcatccgcagcatgcggaatcagtgtatgcactgtatgcgcaacgaacgggcgcggttcgaaataaacaagcgtaatcaaatagttgatcacaaggcctgcaattcctgtgatgcctgcgtatagcacatgttttctgctttgtgtgttcccaaacagccagattgccaataggataagggcataggcgacaatggcatattccgtgatgaagaccataatggaatcgagaactgaattgtgatgagatagtccatggattgctttaaaaatttcgtagttcaaataatcaccttttacatttttatatttagtagactaatcttactcatgaaaagtttcaaataaaaatagagattgtctgaaataacggcgcttgaagagaattcgaagaggaatcgcggtttctggggggattctgtgcacaaaaaaagagatccggagtgtccgaatctcgtaccgatattaaagtgcttcaggtccttcttcgcctgtgcggatgttgatcgtattgctgatttcatagacaaatattttaccgtcacctggtgatcccgttttcagcacccttttagcggtctctgtcacttgatcaacaggaaccttgctgaccacaatttctatttttaaacgctcgtatacattgctttctatttttacccctcgatagagctccgtatgtgctttttgaaggccgcagccgtgtacattggagaaagtcagagaggtcactccgatttttccgagttcctgcttcagcttttcaaaatttgccggacgcgttacaatttctaccttgaacatttgaccgctcatagcgtcactcctcacatagaatcttgatatgctttttccccgtgcatcgttaagtcaagcccaagtgactcttcttcttcagttgcgcgaaggggaaggaagaggcttacaattttaataataacgaaagtgacaataaatacaaaaacataagtggcggcgatggcgacgatttgtttccagattaagcttgcatcaccgtaaaataacccatctgcgcccgctgagttaacagaggttgttgcgaataatcctgttgcgattccgccccatgtgccgccgatcccgtgcaggccaaaggcgtcaagcgcgtcgtcgtatccgaatttctttttaagcgagaatactccccagaaacaaacagctccgccgatgatgccgataataatggaagcgaacggtgtgacaaatccggcagccggcgtaatggcgacaagcccggcgattgccccagataccgctccgagcattgtcggttttttgttaatgatccattctactaagatccagccggcgatcccggctgcagccgcggtgtttgtgttgatgaacgcgtacatggccacaccatctaaggtcaatgcgctgccgacgttaaagccgaaccagccgaaccaaatcaaagctcctcctaagaaggtgtaaatgaggttatgcggagaagacgctgtaccgtctttccgtttgccgagcacaatggcaagaacaagtcctgccaccccggaggaaatatgaacaacattgccgccagcgaaatcgagcgctccaagctggccgatccagccgccgccccatacccagtgcgctacgggtgtgtaaaccaaagaggcccataaaaccgagaataaaagaaaagcgccgaatcgcatccgctctgcgaaagccccggaaataatcgctgtagtcagaacggcgaacgtcatttggaacatcataaataacgagtgggggatggtatcgctgtaatctcccggatcaaatccgacccctttgaggcctgcccactccagcccgccgatgattgaattgcctggtgcgaaggcaagtgtatatccgaacagcacccaaacgatggaaacgatggcaatggaagagaaactgtgcatggcagtgctcagcacatttttgctctttaccattcctccataaaataacgctaatcccggggtcatcagccacacgagtaaagcgcaaaagaacataaaaactgtatcgcccatttgcatgtctcattcctccgtatctttcagaataaaaagcaattattatatttcttcattatagagaaaaaagaatgataaaacattttcatgtaagatttcctgacatggtttttgagaaatgttatcgagggatggaaaggaaggagaatggcattttttgcgatataagactttgtatctataaaagaaactattcatatgagctgaaaagggaattgacattaattagaatactctatactgtattaagtgtactacatcaaataatacactgagggggatgtatgatgaataaaggcggcaggctgaggaaagcggtacgcaagtcgattcccgcgacgttccgattgtttttagcctttaattttttcgtgtacggtctggcgaaagtggtaattggccagtttggcgaggtgacgcctgaaatcgaggcggctgccgggaaggggtttacgatcgcgtggacatttttcggttattctcatgtctatgaactgtttataggttttggtgaaatcctggcagctgttttattactgattccgcgaacggctgcattaggggcggttatttttatgcccattattgtgaacatcgtcttgattaactattgttttgatattggcgtgcaggatcttagcacgatattaatggttatgtgtcttatcctgctttggatggaccgccgcaaattcatgggcattttcaggcaggaaccgatagacagcaggcaggtgatgaagcgatgacgccctttatgattacagtgcttgccggtttgttcgtatgcacaacctgttactactacataaaagaaaaatcatgagaaaacgctccttctgagaatttcacaagcatcataaaagaacttaggcagtgtgaagagtaaaatatgcaatgtgagaaacactaacagtatcaggaggagacgtatgatgaatacactcaacattgattttcaaaaaacagcattggttatcattgatttacaaaagggaattgtgccgattgatcaaagcggccaggttgtcccgaacgcgaaaaagctcgtagatgaatttcggaaacataacgggttcatcagctttgtaaatgtagcctttcatgatggagcggacgccctgaagccgcaaacggatgagcctgcgcagggaggttcaggggaaatgccggcggactgggccgaatttgttccggaaatcggtgtgcaggatggcgattatactgtgacaaaacggcaatggggtgctttttttggcacagatttagacttgcagctgagacgtcgcggcattgatacgattgtattgtgcggcatcgcaacgaatatcggggtggaaagcacagcacgggaggcatttcagcttggctatcagcagatttttattacagatgccatgtccacatttagcgatgaagagcatgaagccacactgcgctttattttcccgagaatcggtaaatcgcggacaacggaagagtttctggaacaagtgaaatgatgttatcgaaaaaaagccgagctgtttttttaacagctgtggcttcgggaacaatgctgaatccgctgaactcgtctatgatctctcttgcgctccatagcatccagcatgagtttcacctctcgtttacaacggtttcctggctgatttcctcgttttacttggcgagtgccgtagcgcagcccgtaacgggaaagctcggtgatttgattgggcggaaacgcttgtttttattcgggcttattcttgttgcggtttctgccatcggggcgccgtttgcgccgacgtttatgacattattggtcatgcggctgtttcaatcggtggggagcagtgcgatttatccgtcaggtgtcggcttgattcggaatcatattcatgagcgccaagcttcagccttggctgtactctctatttttgcgtccgccatgacggcgctggggccgacagccggcgggtttttgattgtatggggaggctggccggcgatctttatcgttaatttgccgtttattatcctcagcttcttattgggcctgtatatgttcccgaaagatcagaaaaaaggggcaggaatcaaaaccattattcggcagctcgatattcttggaattgttttatttgccgggggaatcattttccttctatcctttttgctgtcgttcagcacgtcgccgcatgcggttgaaggtgtgcttggcttgcttctgctctgtgcgtttgtctggcgcgagctgaaaacggataagccgtttattgatgtccgtctgtttaaaacacagcgaaacctgtcagccgtgtatgttcagtttattttattgaatgttttcttctattgtttattttttggtttgccaagttactttcaggatgaaatgcatctttctgttcaaacgagcggcctgtttatgctgtttatgtctggaatgagcatcgttgtgtcacctctaaccggcaaatggatcgaccgatctggtgtcgtcaagccgatctttgcgggagcgcttttgatgacggctggagccgtgctcttaaccatcttttttatcaatgtccagaccatcggtaaaggcctcattctgtcgctcttgggtataggctacggactgggcaatgtcgcgcttcaggcagcgatgctggaaacgagtccttccaacatggtaggaacgacttcaggcctgtttcaaacctgccgttacctaggatcgattttgtcttcggtgatccttggcattctttttggtaaagaaatcacggcagcccattttgatatgatgggaatcattatgattatagcgggcggagcaagcctgttaatggctgtgagatttgctgcattaatgaaaactgcatcttaagaaagagacgggctctgaggtctgtctctttttcttgtttaagctgttcaaatacaaacgggaaaattgtatatcatagccagtgttattgtctgactcttcagttatattaagtgacatctaatgtcaaaaaacataacgtgtgacgacatatagacaatatggaaaggggagccggctatgaaattaaaagagagtcagcagcaatccaacaggctgagcaatgaagatctggtgcctttgggacaggaaaaacggacgtggaaagcaatgaactttgcctccatttggatgggatgtatacataacataccgacctacgcgaccgtgggaggattaattgcgatcggcctttcgccttggcaggtgctggcgatcattattacggcatcacttatcctatttggcgctcttgccttaaacggccatgcggggacaaaatacgggctgccgtttccagtgatcattcgggcttcttacgggatatacggcgcgaatatccccgcgcttctaagggcgtttacagctatcatgtggcttggcatccagacctttgcgggtagcacggcactgaacattttgcttttgaatatgtggccaggttggggagaaattggcggcgagtggaacattctcggcattcacttgtccggtttgctttcctttgtattcttttgggccattcatttactcgtattgcatcacggcatggagtcgattaaacgttttgaggtgtgggcagggcctttagtgtatctggtatttggcggcatggtatggtgggccgttgatattgctggaggattgggcccgatatactctcaaccaggaaagtttcatacgttttcagaaacattctggccgtttgctgccggagttactggcatcatcggcatctgggcgacattgatcttaaatatacctgattttacacggtttgctgaaacacaaaaagagcaaatcaaaggacaattttacggtttgccgggaacgtttgcgctgttcgcattcgcaagtattacggtgacctccggctcgcaggtcgcgttcggagagccgatttgggatgttgtcgatattttggcgcggtttgataacccttatgtcatcgtcttgtccgtgatcacactctgcatcgccacgatctctgtaaatgtcgcggcgaatatcgtatcacccgcttatgatatagcgaatgccctgccgaaatatatcaatttcaaacgtggcagctttatcacagcgttgctcgctttatttacggttccgtggaagctgatggagagcgcgacaagcgtgtatgcgtttcttggcttaataggcggcatgcttggaccggtggcaggcgtgatgatggccgactattttatcattcgcaaacgtgagctctcggtagatgacctgtattccgaaacaggacggtatgtgtattggaagggctacaattaccgtgcgtttgcagccacaatgttaggagcgctgatttcgctgattggcatgtatgttcctgtattgaagagcttatacgatatttcttggtttgtaggtgtgctgatttcctttcttttctacattgttctgatgcgtgttcacccgcctgcatcattggcaattgaaacagttgaacatgcgcaggtccgccaggctgaataagatctatttagacggtatattttcatatttttgaaatggttttccataaatagaacatttataatggttttagaaatctattctaaaacgaaatgggaatcgaaaatgagaaaatggtattttattcttttggcgggtgttttaacgtctgtcatcctcgctttcgtttatgataagacaaaagcgaatgaggaaggatctggggattatctgtatgtttcgccaaatggcagtgatcaaaatgaaggaacaaaagaaaagccgtttcgtacattggcacacgcatctgagaaggctgctgccggcacaactgtcatgattcgggagggcacgtatcatgagacccttgatgtaaagcacagcggtacggacggaaagcctatcacattccgaaactatgaaaatgaaaacgtcgtgattagcggtgaatccgttgcgaacgctgaatatgaaacaccgcttattcgtattcacgataaacatgacattgccatcagcggtttaacaattcaagatctttctgtttcatctgaggaagcaactgctatagggatttatgtatcagggtccagcagtcatatcgccattaaggataatcacatccgggggattaagacaacagcggatgaaggaaatgctcacggaatcgcagtttatgggactggcagcatgaaagacatccgaatcgaggacaatacagttgagaaactgacgcttggagcgagtgaagcagttgtgctgaacggtaatatcgacggcttcacagttgcaggcaatgtggtccgcaacaataataacatcgggattgatctaattggttatgagggaaccgcggataaaaacgattacgtgcgaaacggagtcgtagaaaacaatacagtttatcaaaactcgacttacggcaatcctgcttatggagatgaatactcagcgggcgggatttatgtcgatggaggacacgatatcgaaattaagaacaacacagtttacgataacgatattgggattgaagcaacgtctgaacacaaaggaaagtatgcaaatgccattcagatcacagacaacaaagtgtacaacaatgcgtacaccggtatttcaatcggaggatatgacaaaaagcggggcggcaccagcaattctctgattgcccgcaatattatgtaccggaatgacacaaagggactgtacggcggacagctgctgctgcagtacgatacgaaaaacaacacaattgaaaagaatatattgacggccggtgattccagattatttatcggaaacgactttacagaaaacgaaggtaatacggtcaatcataacgtgtaccacaaggaagcggatcaagacggcatatggatgtggaaaaagaaagaatatgattcattttcttcgtatcgaaaagcaacaaaaaacgatcaacaatccatatatgccgatccgatgtttcgtgatgaagcgtcctatgatttttcgttagatcctgattcacctgcgcggcctgtcattgaataattgctataagcggcgttctctcgttcaaccgagagggcgccgtgttttaatggaaaaaagactgccgggatttcccggcagtctgacaagttattctgcaatagacacttttccttcagcctctgcaggttttttctggctccacgtgtagagaagcagagcaattaaaacgaacagccccgctgttaaataaatggcagagaagccggcagatgctacaaacaatccgaatacatacgatcctacagcaattccgctgtcaaagaaggtaaagaacgttgccgtcgcaaaaccggagcggtgagccggagatttctgaatcgccaatgtttgcatgcaaggaacgattgatccgtagccaagaccgataaccgcccctgaaagcagaagcattaagccgctatgtgtgaaggacagcatgcagagtccgacagagaaaatcaggattgatggataaatgacaatgcccggtccgactttgtcgaacaatttccctgtgaacgggcgtgcaatcatcattgtcaccgcaaaacaaacaaagaaatatccgctgatatccgaaaggtcaactgatttggcgaatacagacagatatgatgtgactgttgaataacagaaagaaataaacaaaccgaccgtcgcaattttgagtgcgcccttttcaaacatatccgagaacgcaaaacggaatacagtcgtgccgctgtccttactttgcggcacttttatcaagaacgaaacaagtaagcccgcaaccataaacagcgcaaaggctgtaaagaatacaggaaagcttaccactctcatcaaattcaggccaaggaaaggcccgatcgccatagcgaggttcatagacatggcaaagtatccaagcccttcaccgcgccgtttggctggaataatatcagcggcaattgcacctgtaacagtcgttaaaatgctgaaccaaatcccttggaagaaccgcaatccgagcagcagggaaaagttatgaatcggcatatacagaaaagatgatagggcgaagagcgccattgatacaatcgccattcttttcttcccgaaacgctcaacgatggctccggagaaaggccgtgtaatgatcgcagacagaaggaacaggctgattaaaagcccgccttgtgattctgtgccgccaagctcttgcagtgtatagatcggcaatacagttaaaaatgtataaaagaacacaaacacaaataaattgacaagcaggaccataataaaatccttggtccatatcgcatccgcttttttcaaatgtatgtcacttccttattttcattgttgtaaaaacatgcggaataaatgagaaaaagcttctttatcttcatcccggaaatctgcaagcagctcttcctcgaatttcaacattttcacattgatttcttcgtattttttctcggcttcttttgtgaggacaacaagtttttcccgtttgtcttcaccttgccgtctctgaacccagccgttctcctccaggcgtttgatcgtccgagtcacagtcggcgcttccacatttaaataggaccaaatctctttttgagtcattggtccgatcgtacgcaaacaatataaaactgaccattgagatgaataaaggccgaatggctctagctgttcattggctttcttggcaatcaggcgggcgctttggttgatttgatgaatgaggtgtctgttgacgtaggacatgtcggtctccttctaaaaaacttacctaagtaactaattgcttatttcattttacaggagcgatcaatagttgtaaagatgaaaatttagtgacgcgaaatagtttgctgaatctgaaaaagttcgtttcaccccttgtccttattgagtttttagcatattcccaaaagaatgctaatacactgttacaaacctaacaaagagagtgtttgaggtgagggatcgtgggcatatttcacaaacttacttttaaaaccatacaacgaagaagcggcataatgaacgactctttacagaatacggatctcatttcacacttctcacatccattttagggaggtcgagtggtgtgcacgattacatcaaagagcgaacaatcaagatagggaagtacatcgtggagacaaagaaaaccgttcgtgtcattgcgaaggaatttggtgtttccaaaagtacagtacacaaggatttaacagagcgtctgcctgaaattaaccccgacttggcaaacgaagtgaaagaaatactcgattatcataaatccatcaggcatttaagaggaggagaagcgacaaagctcaaatataaaaaagatgaaattctcgaaggagagcctgttcagcaatcgtaatcacctggcattgccttcttgaaatcgttcataaaacatccgcaaaaatttgtaaagaacttattgtgcttccaactttttttctatattttatgataatatatataattagggcacaatgtggatatttactgtgaaacagattttcaaggaggatataaatagatgtttgcaagggatattggtattgacctcggtactgcaaatgtactgatccatgttaaaggtaaaggaattgttctgaatgaaccttccgttgttgcacttgataaaaacagcggcaaagtgctggcggttggcgaagaggcaagacgaatggttggacgtacacctgggaatattgttgcgattcgcccgctgaaagacggagttattgctgactttgaagtaacagaagcaatgctgaaacattttattaacaagctgaatgtaaaaggcctgttctcaaagccgcgcatgctcatttgctgcccgacgaatattacatccgttgagcaaaaagcaattaaagaagctgcagaaaaaagcggcgggaaacatgtgtaccttgaagaagaacctaaagttgccgctatcggcgcgggtatggaaatattccagccaagcggtaacatggttgtagacatcggaggcgggacgacggatatcgcggttatttcaatgggcgatattgtcacctcctcttctattaaaatggctggggacaagtttgacatggaaatcttaaattatatcaaacgcgagtacaagctgctgatcggcgaacgtactgcggaggatattaagattaaagtcgcaactgttttcccagacgcacgtcacgaggaaatttccattcgcggacgggacatggtttccggtcttccaagaacaattacagtaaacagtaaagaagttgaagaagcccttcgtgaatctgtcgctgttattgttcaggctgcaaaacaagtgctcgaaagaacaccgcctgaactttctgctgatattattgaccgcggcgttattattaccggcggaggcgcgctcttaaacggccttgaccagctgcttgctgaagagctgaaggtaccggtcctcgttgctgaaaatcctatggattgcgtagccatcggcacaggtgtcatgcttgataatatggacaagcttcctaaacgcaaactaagctgatttcacaaacctcattctgaaaaagaatgaggtttttttatgaaaaagccttcacgaaaagatgttaaatgacgataataggataaaatactgagtttttattatagaacgaacgttcctatatgacaactggaaaaaatgccatttttagaggtgggaaatttgttaaaaggattatatacagcaacatccgcaatgattgcccagcagcgaagaacggaaatgctttcaaataatattgctaacgcaaatacatcaggatataaagctgatcaaggctctatgcgcgcgttccctgagatgctgctcagcagaatagaatcaaaatctccggccgggacatcaaggacggaaatcggttccgtgaataccggagtatatatgcaggagctcaagcctctctttacacagggaagcctgaagtccacagaccagcctacagacattgcattgatcgaaaatcaagttccgatgagtgcggaaaccaatgaaaaagctgctcttttttatccggttcaaacagcggatggaatccgttattcaaaaagcagcacattttcactaaatgagaacaatcagctgacgatcaacggacgccctattttatcgacggatcgccagccaatcactgttgataatgagaatttcactgtgtctgaaaacggtactgtgacaacgaacggacgcacagccggccagattgatgtcagaatggcggaagatgtccgcaatctcaaacgggacggaaatgatttgtacagcacggcggacggtaatgatctgccaagcgcagccggaaataatcaggtagcctattcattaaaacaaggcgtctcagagctttcaaacgtggatgtgacaagcgcctatacagaaatgactgaagcgtacagatcgtttgaggcgaatcagaaggttattcaggcttacgataaaagtatggataaagcagcaaatgaaattggaaaaatttaagaaaacggaagaaaaaaacgggggacatcaactatgctcaggtcaatgctaacggcatcaacaaccttaaaccagctgcagcagcagattgacacaatcagcagcaacctttcaaacagcaacacaaccggctataaggcaaaagatacgaatttttctgagcttgtcagacagcaattcgatcaggttgatgaaaaaaacgaggaagtggcaaaagcccgaaaaacgccgcccggcttgcgccttggcgtcggagcgatgatgagttcacgcctagtctctgatcaaggaagcattcagaagaccgatcgcgatctggatatcgcatttacgtctccataccagtatcttcaggtaaatgtaaatggaaaccgccagtatacgagggacggggcgctgtatgtaacgccgtccgctgcgaatgccaaccagctgcagctcgtcactggaaatgggtatcccgtacttgatgagaacggcaatacagtgaacatcgacagctcaatgaagaatatcaccattaataagaacggcaccttaaccgcatctgacggaaacgcggttcagcggtttaatcttggcgttgtccaagtgaataaccctcaagagctgaaatccgaagggaataaccttttctctattgataatgcggcagcttttgaagagctgaacggcgctaatagacaaaacatcggcatgcagcagggctcacttgagatgtccaatgtcgatatttcagaacaaatgacagatttgatcacgtcccagcgttcatatcagctgaacagcagaacgatcacaatgggagatcaaatgctcggtttaatcaattcagtcagataataagaaaatgggcgtttttcaatcagccgcgcatgataaaaaaagcggctttttcgaaatcgtccttttttttgtagtattccgtaatatcttctaacagcacttctaaatccacccacgcctcgattttttctaattcaagcacatattcgagcagctgctcataagggtcttcggctgatgtgtagagggcttcaagcgtttttaattttaaataaatggtttgaatgtctaccttttcagataattcttttcctttttgaaggacggctttagcttctgtgatgttccctgttttaaaaagcgctctgacagactcgtacacacaatgaagatatgagactggtgaattcatttcaaattcttgattctttaatacttttctaaagtaaagaagcgcttcctggtcttttttctcggtcgcttttaaaaagccaaggttataataagcgtggcatagcaggttttcgtcatgtagttgctgggttttcttaatgatttctttgaaaagctgttcagctttttcatagcgttcttgatcaatataattcacggcgagcaaaagtttacaggtgattacctttttgatatagccgaattggtgcaaatagatgtgtaatgcttttttgacgtattggacggaaagcggcggtgatttcatcaagtaataggcgccggcggtttgataatataaatcagcggcttcaaacgtattgtgaatggcggccaggtactgttcagcttttttaaaatgatgtactgcatgtttcggagctgtttttaccatctcatataacccagagaaaaaatacagataatatttcaattcatcatccattttgtcttccaggccatataggccatcgaacaatgaatcgagtccgttctggttttcaaaaagcagctgatggcgggcctgaaacaattgataacgcatccaaagttttgtgttctttttgatctttggaaggtgctgatcaattttctctttcagtgtgcaaacgtgattcattttgcgtttgctcattgcggaataccactcgtctaacatgtttagcattcttttttcaataaacttcgaaatcattttcctacctctttgctattggtaaaatctataattatcatatcataacttttgacggctctcattgacagttggttacattttagcgcggttgaaaaagagattaattcataatatacttttcaaatgtacagattggatctttgatgattgctatacatactaatgcagatgaaggagatgtcaagacaatgcttgatactcagcaaattaaagaaattattcctcaccgttatccgtttttgcttgtggatcggattacggaagttgaagagggcaaacgggcaaaaggctataaaaatgtaaccgctaatgaagagttctttaacggacattttcctcagtacccggttatgcccggcgtattaatcgtagaagcactcgctcaagtcggagctgttgcgatgttgattaaagaagaaaaccgcggcagactggctttttttgcaggcattgataactgccgctttaaaaaacaagtcaagcctggtgaccagcttcaccttgaggttgaaatcattcgtgcccgcggcacaatcgggcgcggaaaaggcgttgccacagttgatggcgaagtcgtttgcgaagtagaactgacttttgccctcggagaataattgaaaaaaggcagatggccagcggcacatttgtctttttttctttacaaatatagaaaagcaggtgattgtatgtggaatgaatttaaagcctttgccatgcgggggaatatcgtagaccttgcgattggtgttgtgataggcggcgctttcggaaagatcgtcacatctctagtaaatgatatcattatgcctttggtcggtttgctgctgggagggcttgacttttcaggcctgtcgtttacgtttggcgatgctgtagtgaaatatggcagctttatacagacgattgtgaacttcttaattatatcgttctccatttttatcgtcattcggactttgaatgggttaaggcgcaaaaaagaagcagaagaagaggctgcggaggaagcggtggatgcgcaggaggagctgctgaaagaaatcagagacctgctgaagcagcaagcaaagtcgccggaataaaaaagatgccgttagaaacggcgtctttttttatctcaattttcgtttaggttcgttctgtgtccttcagttctttagggcttcctgttgtttcagcgagatgaatgagcattgagacagaggtgcctgcatccggagtgctgctgatcatcaactcgcttccgcaaaaatgtttcagccgctgattgatatttttcaatccgacgctgcgatcaaaatccgttgataagagatctatttgtttttccggagttatcccgggaccgttatcctctactttgatgtgatactcatttttgctttgttttttagctgtcagtttgatccatcctccgcctcttttcttgctgacaccgtgaagaacggcattttccaccaagggctgaatcattaaaggcggaaggataaagtcaatgtcttcatctatatcgaaaagaacctcaagccgattactgaatcgcgtcttttctatagaaagataggaattgataatcgaaagctcatgtctgaaggaactgatggctgatgtattttgaaagtcaaaactcattcttaaatagttggtaaattcctctgttacctcccgggccttttcaatatccaaatgagtgagagaaataatcgtgtttaatacattataaagaaaatgaggcttgatttgcgactggagaaacgccatttccattcttgtggcttgatttgctgtatgtttcatcattatcaggttttgaatacgcgccataaattcagagtaatgatagggtttttgcaaaatgtcattcgctccggcatgaaaagccttgtatttgtcatggccgataatggcagctgtaatgatcagaaccggaagatcaaccatgctgaatcgttcgcgaattttcatacagacttcgaaaccagtcatatccggcatcatcaagtcacagcttcaggccttgcaccgggacaatacgcttttgttgaaacgaaagcgccagccggttatgtgctgaacactgagaaaatagagtttgagatttctgattcctctgaaggaaagcctgaagctacagatgccgggatcgccattaaagcattccagtcaagtggagaacgtcgaaagcacgtgaaatatacttatttttacttcacaatcaaggcggcggataacaattaaaagtgtcgatctggagcttccgatcgtaaaaggcacaaccaatgaaaatcttttgataggggcggcaacaatgcgccgggatcaaaaaatgggtgagggaaattatccgttggcgggccatcatttgaagcaaaagaatcttctgttcggacctctggaaaacataaaaacaggtgcccaaattgtcatcacggattttaaaaaggattatatctattctgtaacatcgaaagacatcatatcggaaatggatgcagatgtagttgaggagacaaacaaaaaggagattacgttaatcacatgtgacaaggcggtcaaaaccgaagggcgcctcgttgtgaaaggggaattggttgattcttttggccatacaaattaaatatgcaagagtgaaagcacgaagagaaaagctgccgttcaaaacggcagcttttttcatgcagaacatatctattctaaatgtctattgtgatgctcttcggttctgagtctgttttggggaacatgccccctcatatttataatttttgcttaaatgcctcaatgagttttgttcctgtatagccctcttttacaagggactcgagaatggtttcagtgccctgctgttttcttgtgaccatttgtccgtagagtaaaacctgaatgctttcttccagcttgacgatatttttcactgctgctgtcagctgggcggggcgattgctttttttcgtgatcgttacaaatactttggcttcagattggctgttttgaagctgttcaaaaaaagacagatgttctttctgtacaagcgcctcaatcagccagtgattttcaccgtcttctttatttataatcagtccgtcaataaggggaaactgttcaattgattgttcttccttgtccactcgttccacattcaggtcaaccagtttaaaggttttcatttcttctcaccccgattacttccaaagttttcttgccttccattataacataaacgttttcgaggaaaaaatcctgcaatgttggggctaaagaattttgtatgagcgaaacatttaataatttctattttttcattatactgtaactgactatggattacggagagatgtggtatgaatcaatttcgtttaaaagaaatttatattgacggcgttccttctgaaagtcatttgattcaaaaggaagtaacatatatgttaagccgtaaagaagtgtttgaggttcatctgaacaaaaaaggaagaataagttttttatacgaaacacaagatggcatggagcagtataaaatcaagctgtcaatgccggaaaaaaaattgagctttcagtggtttgcgtgggatggctcttcctatgtgcgcatgaatacgcaaaactggctgacaaagcaaatctttttccgttttttaaaaagtacatatttcttcaaaggaaaaaagcaaaagatgtttttagctgaaggaaaaatgaaaacgaaagataaaaacagaggctgaaagccatttttaagcgtttttcttttcttgttgcatcatttacaatacatacaaccgcaaggagaggaggaatcgcatgttcaatcaggtcatgcttgtcggacgtcttacaaaagatcctgatcttcgctacacttccgccggtgcggcagttgcacatgttacgctcgcggtgaaccgcagcttcaagaatgcttcaggtgaaatcgaagctgattacgtcaattgcacactttggagaaaaacagctgaaaacacggcgttgtattgccaaaaaggttctctcgtcggcgtaagcggacggattcagacaagaagctatgaaaacgaggaaggcgttaacgtgtatgtaacagaagtgttggctgacactgttcgttttatggaccctaaaccccgggaaaaagctgctgattgacacccctgctcctcccgttatctatccattcactattatccggatcttcgcatcatcccctcaaaattgaccagtcgaccagactggttctttctttttgcctacttaggaaaaattggttctctcgacgcatttttacttaaaatcacttattaatgttgaataaaatcaaataaaaacttataattacttataaatgattgctgagaaaaggaatgagggcgtgtaccaagaagaaagattagtagcgattttggattttttaaaacagcataaccgaattacaacggagcagatctgtacgctcctgcaagtgtcaagggatacagcgcgacgagatcttgtgaaacttgaggaacagaatgccatcatccgcacaagaggcggcgccattttaccgactgtgcatcagaaaattcaaagctattccggccgcctgaaaacagtgtctgaggaaaaaaataagatcggcaggcttgcagcatcgcttattcatgatggagaccgggtgattttagacgcctctacaactgttcaggcatgtgcaaagcatttgaatgcggttgattgtaccgtaatcaccaattcgattaatcttgcggatgtgctgtccgataaagagggaattgaaatttatctgctgggaggcaagctggaaaaggagcaccgctttctgtacgggtcctctgtgattgaaaagctctcaagctaccatgttgataaagcgctgattggtgtggtcggcatttccgaacatggcattacaattgcgcatgaagaggatggcatggtgaagcggaaaatgatacagcaggcaaagcaggtaattgcgcttgcagaccattctaagctgggcagcaccagtttttatcagtatgcggagctgaatgaaatcgacctcttgattacagacaggctgccgaatcaggcattttgtgacttgcttgaccgaaacggcgttgagcttctcgtgacagagcaggatgaaggaaaggactgacaaacgtgaaattaattgcgattgacttagatggaaccttactcaacagcaagcatcaggtaagcttggaaaatgaaaacgcactgcggcaggcgcagcgggacggcattgaagtggtggtgtcaactgggcgcgctcattttgacgtcatgtcaatctttgaaccgctggggatcaaaacatgggtcatcagtgcaaacggcgccgtcattcacgatcccgagggcaggctttatcatcacgaaacgattgataagaaacgggcgtatgacattctctcatggcttgagtcggaaaactattattatgaggtattcacaggttcagcgatttatacgccgcaaaacggcagagaacttcttgatgttgagctcgacagattcagaagcgcaaatccggaagcggatctttctgtccttaagcaggcggccgaggtgcaatacagccaatcgggctttgcttacattaactcctttcaagagctgtttgaagccgatgagccaatcgatttttacaatattctcggcttttctttcttcaaagaaaagcttgaggcaggctggaaaagatatgagcatgccgaagatttgacgcttgtcagttcggctgagcacaactttgagctttcttcccgcaaagcttccaaggggcaggcgctgaagaggcttgcaaaacagctgaatattccgctcgaggaaactgctgctgtaggtgacagtttaaatgacaaatcgatgctggaggctgcgggaaaaggtgtagcgatgggcaatgcccgggaagacatcaaatcgatagccgatgctgtcaccttaaccaatgacgaacacggtgtcgcacatatgatgaaacatttgttgtaagtatatgtgctgccacaaaagcgcaccctgttgataaccggcgtaacggattttttggaaattcggcgtgacggctatgaacggaaaaaagctggctcttttagagccagcttttttagtcatgattattgcgctgtagcgcttaatgtaaacaattcttcgagctcctgtgtggaaagctcggtaatccagttttcactttggataatttgatcgttcagggtttgcttggattcaagcatgacatcaattttttcttcgattgttcctgtcgtaatcattttatgaacgtggacaaagcgctcctggcctatgcggtatgcacggtcagtcgcttgattttcaaccgccgggttccaccatctgtcataatggatgacgtgattggcggcggtcaaattaagtccggtgcctccagctttgagtgaaagaatcagtgtcggatattctttcctttgaaatttctcaacgagtgtatcccgctcttgcttggagagactcccatttaaaaattgcacaggttccccgaacgttttttcaagcagccgcttcatcatgttccccatctgaatgtattgcgtgaaaatcaggcagctttcgttttgggcgcggatcgctgtcatcagttccagcaatttttcgagcttgactgatctgccggccagcagctcggtttgctcttcctttaaataaagcgcgggatgatcgcatatttgcttgagccgtccaagcatgctgaggatcagcgcttttcgctgcatgccggtcagggatgtcatatggtcaaaagtgtctttgacgagctgctcataaagggatgcctgctcggctgacagagggataaattctttttcttccagcttctcaggaagattaagcgcgacctcttcatcccgtttcgtccggcggagaaggaatggccggattaattgctgaagctgtccgattctcttttcgtcccggtctttttcgatcggcagcacatagcgtttatggaagccggtcaaactgccgaggtagcctttattcatgaagtcaaaaatagaccacagctcagtcagtcggttttccatcggcgtgccgctcagcgcgatatggtgaagccccttcagcttcctgattgcgcgtgattgcttcgtatgcgcgtttttaatattttgcgcttcatcaaggcagatcgtgttccatgtcacagaagaaagctcttcagtatcggcatgtgacagaccgtatgaagtgagcaccacgtctgcgttttcataatgcgcggcgaaatcatcaccctttggccggcgcggcccataatggagcgcgacagacagatcaggggcaaaggtttgaagctcccgctgccagttgccaagtacggatgtcggcgcaataatcaaatgaggcgttttttgtcggccgctttccttcacgtgaaggaaataggcgatcatttgaatcgttttcccaagccccatatcgtcagccagacaggcgccaaaaccgctttcccgcagaaacagcagccagttcatgccgtatttctgataagggcggagcgttcctttgaaagaaggactgactttgtgctccggcaggttttccgcggcagtgagctttcgaatcagtgacctgagctgtttagacagatcaaactgaatgccggcaaaagcagatgtatcaatcaggtccgaatcctcaagtccgccatcctgctgatccattagctcccgcgccagaatatcagacatgtggagtccctctgattctgctttttccatcaggcgtttcatctgtttgataaactgcggatcgattttaacccattgcccgcggatattaacaaggcgcctgttgctggcgacaagctcattaaattcagcctcagtcagttcaattccatttgtcgcaaaccgccagttgaaatcaagcagtgcattcatgccgacaaatgactcgccgcgcggggaggaagacacctttgctttcagcatcatgttgctgtctctgacaatctgccaccaggacggcaggaggatttctacccccatatcgacaagcgtctcacttgcttctgacaggaagatccaggcttcttcctccgagatcagcgttgtcccggaatcaaacgacagccacggaaccgttctgtgaaagcggtcctgctcacgcgcgattttatcgctgtacgcctgccacgattttttgaggctcttcagtccgtcaaagaattctacagcaccgctctttttatcgcgtaaaaacatctcgatcttccattcgtctccgtcaaagtccggttcatttaagcgcaagccgacagtaaatggagattgatcgtcaatccagccaatgccttccagaaaatcctcttcatcaagaaaatggccacggaatgtcgtaaccgcaggcgatttttccttgatatgttcccatttctcccgcaggtcatcgtcgtactggatgtaatcctgtacggcagcggaaaaccattccgcagtaaagccttccagtatattatcgcggtccttccagcgaaaaacaccgtttgtccatgcgtcatagtcaggcataaaatcgccgtccgcgataaattcatagatggtcgatgccgcctcgatcagcggctccgtttcttctgtaagctgcacggagctgaatgagttgaacgagtttttgccgagaagctctacagtcatccatggagatagaaggacagcagtcgtcccgatgaagctgacatcctctagaaaggttccgtaaaatgaggattcatgccattggaacaaatgctttttcatatggctgtagggaagaggctgctcattctcatcaaaggctgagagcgtaaatgacccatcttccatttgttcgacgtggatgagaatttctttaagactcgccatcaatcaactttcctttctgcagttcttcttgaagcgcacgcaggcgcttgtaatgcgagctcagcagctgaatataccgctcccacaccttctgctttttcgcttttttgtacagggtgcgcaattttttcaaataccgggcggcttccttgtacgagctacggttcttctgatcaatgaaaaaagccacttctctatggtaagccggtataagcgcctcagggtcgctcgctgcaatttccttgagcatcattttatccatttcattgatggaaaagccgacaaggctatgaatttcaatccactcggcatagcgttttttttcatataaatgatggctgtattctgtgaacgtatacggcagacagcccgcggcaaagcgctcaaacagcgcttgatcattggtttgctgcacataggcattcaacagaaggaacagctcgccgatcacatcgcgaatctctttaaacggcttatccagcttcgtataacccatcgcaattggttcaatttgctggtaccatgttttaagccgtttccagtccttcttggcagtcatttcactcagccattggaatgtataagggagcgcttccggcgggaattgatccgcttcctcaaaaataacgtcatcatttttttgcaggaattccaaatgcaggcgcccgaattgcaattcgggagaaaaacgccgtcctgcttcttttttcaatatctcctgttcgcgtgccacccattttggccgcgacagcagcgcactccaaatttcaccgaagacgcggatgcgttcatattggaaaatttcttctttcaacagcaaatgccggataacatccggtgttttatccaaaaacggatcaagcgcaaaagacagcgcgtacgtttttaatttatcaatagagctgtagattgtatccatcagctgttcaacgtacggattgagggaataaaaatcttgttcggggtttagcttgcccgcttcaatcaatgtgaacatgcgaagccaaaccgcaatcgcggaatgaatctgatacaggcttttcagctccggcttgttcggcgcatgtttttttaatgcggacaggtagccgtaatagaggccctgcatgttttggctgccttctggcgtacgtgcctgccagagagaaaactctgaatcaaaaaaagcaagccagcttgaaagtgattcttcattaggcagcaccttttcctgaaactggcggcggacgagctctttgctttcctcaagcttttccctctccagccaatactctgtaaaagtacccactcgctcgaacattgcatatacatataaaaacacagccagcatatggcggcagattcttccggacggacatgaacagccgcttttgactatgacaaacaagttcaatgtgacccgcacaggcacaacatcctgcacgtaagccgtaacttccgtcggactcactgcttgtaaacgatagactgaatcctgccgatataaaataagggcttttttgatcagctgaacattttcctcattgtaaggaagaagttcttttaactgttcagcagatgccagcacatcgtctttggaaatcatattctgaagcatgattatcgctcctaaccgagtcacgtaataaaaagatccaatttctctattatatcgcaacacatcggccttaaaaagtttttcctaaaaaaggacataaaaaataggatgtgtcgaatgatgtattagagattgcaaattgataaccagcatcatataataatcgtgttttcaacttaatggaagctgaaaggaaaaaaaagatgagtgaaaagaaattgaatcaagaagaatttctgaaaattttgatgcatgcacatgaaattggtgagcagtcatctgagatgacgacgaaggaaatgcttgaaaatttgatttctcatattaaaaatggatatgcaacataaaaatcccgcacgcctttagcgggatttttttatgcgagagaacgtgactgcccgaataagagaaaatgagacagcactgtcaacacagtaaatatagcgcttacataaaaagtactaacataacgcattgtaaaaaaatgtcgaattatgtcacgtgaaaagctggagaaatgcggtttcaacgttgtataatcgtagatggaaaaggatgttataagagatttggaggtatcatgggagaatctacaagcttaaaagagatattatcaacgttaacaaaacgcatacttttgattatgattgtaaccgcggctgccactgctgccggcggactcattagtttcttcgcacttacacccatctatgaaaattcaactcagattctggtcaaccaatcgaaaaatgaacgaaaagaagtccaatttaacgatgtccaaaccaatcttcagttaatcaatacgtacaatgtcatcattaagagccctgccatcttagatgaagtcattaaagaaatgggcctgtcgatgacatcccaagaactgaatgacaaaattaccgtatccagcgaacaggactcccaagtggtcaacatatcagtcagggatgaaaacgcggaaacagcggctcatattgccaatactatagcatctgtttttcaagacaaaatcacatccattatgaatgttgacaatgtcagcattctgtcaaaagccgaggtttcagaacacccgtcccctgtatcgccaaagccgctactaaacattgccatcgcgtttgcggccggattggcgggaagcatcggactggccttcctgcttgagcatttggataatacgatcaaatcggaagagcagctcgaatccttgctggacatacctgttttagggacagtttccaccattgcgaatgagcagaaaacagcaaagaccttacagggtttccaatctgaaaaaacggggagtggacattttggcgcttagaaaaaacagaggctcgcggatgcagagaaatgtcattgcaatgacagagccgaaatccttgaactctgaacaatatcggacgattcgcacgaatatagaatttgcttcagtggaccggcaaatgaaatcagtcatgattacatcggcttgtccgggggaaggaaaatcaacaacggccgccaacctggctgtcgtattcgcccaacagggaaaaaaagtgctcctgattgatgctgatttgcgaaaaccaacagtacatacggctttttttcttgaaaatacggttggcttaacatctgttttattaaagaaaagctctatggagcaggctgtacaagcatcgaatgaaaaacatcttgacgtgctgacgagcggcccgatcccgccaaacccggccgagcttctctcctcgaagtggatgaaggagcttgcatacgaagcgtgtgcggcatatgatatggtcatttttgatacgccgcctattcttgccgtagcagatgcacagattttaggcaacgtggcagacggttctgttctggttatttcaagcgggaaaacagaaaaagaacaagccgcaaaagcgaaagaggcgcttgcaacgtgcaaaagcaagctccttggggcgattatgaacggcaaaaagctttcgaagcactctgaatacggatattacggaaccaaggacaatttcatgcaaaaataaataacgtgcatcgtgcccgttatttatttttgcgaaaaaagggggctaggacatgatcgatattcactgtcacattcttcccgcaatggatgacggggcaggtgattcggccgacagcatagaaatggcaagagcagctgttcgtcagggaatccggacgatcattgcgacacctcatcataacaacggtgtgtataaaaacgagccagccgcagtcagagaagcagcagatcagttaaacaaacgtttaatcaaagaagacattcctttacatgtgcttccgggacaggaaatcagaatctacggcgaggtggaacaagaccttgccaaacgtcagctgctttcgctgaatgatacaaaatacatcttgattgagtttccgtttgatcacgttccccgatatgcggagcagcttttttatgatttgcagctgaaaggatatattccggttatcgcccatcctgaacgcaacagggaaattcgcgaaaacccgtccttgctgtatcatcttgtggaaaaaggagcagcatctcagattacttcaggaagtcttgcggggatcttcggcaagcagctgaaagcattttctctccggctggttgaagccaatttgatccatttcgtagcctcagatgcccataatgtgaaaacgagaaattttcacactcaagaggctctttatgttctagagaaagaattcggctcggaacttccttatatgctgacggaaaatgcagagcttctcctgcggaatcagaccatcttcagacagcctccgcagccggtcaaaagaagaaaattgtttggttttttttaacagccgattctcatttcaccactttctttttgagagcgatataatagtgtattgtatggttgaatcacatttcagaaatctgtacaggctgtacccgacaggctatgcgggagatcattcgcattcatgataggatgttctcatacgatattacggaagctgcaaagcagcaatttaactgttggagggaaacaatgaatataacagtcatcggaacaggctatgtcggtcttgtgacaggtgtttctctttctgagattggacatcatgtaacctgcattgatattgacgctcacaagattgatgaaatgagaaagggcatttcccccatatttgaaccaggtcttgaagagctgatgagaaaaaatacagctgatggacggctgaactttgaaacgagctatgagaaaggcttggcacaggcagacatcatttttatagcggtcggcacaccgcagaaaagcgacgggcacgccaatctggagcaaattacagatgcggccaaacgcatcgcaaagcatgtcaaacgagatacagtcgtggtaacgaaaagcacagtgcccgttgggacaaacgatttgattaatggactgattactgaacatctagcggagcctgtcagtatttcggtcgcatccaatccggaatttttgcgtgaggggtcggcgatctatgatacctttcatggtgacaggatcgtgatcgggacggccgatgagaaaacagcaaatacgctggaggagctcttccgtccgtttcaaatcccgatttaccaaacggatatcagaagcgccgagatgatcaaatatgcctcaaatgcttttctggccactaagatcagttttataaacgaaatttcgaatatatgtgaaaaggtcggcgccgatattgaagcagtcgcatacgggatgggacaggataagcggatcgggagccagtttttaaaagcgggcataggctacggcggctcttgttttccaaaggacacaaacgccctcgtgcaaattgccggcaatgtcgagcatgattttgaactgctgaaatccgttatcaaagtcaacaacaatcagcaggcgatgctggttgataaagcgctgaacaggctcggtggggtgacgggaaaaacgattgcccttttaggcctgtcatttaaaccgaataccgacgatatgagagaagcgccgtcaattgttattgcagaccgtctcgctgcgctcgacgcccgtatcagagcctacgatcccattgcagttagccatgcaaagcatgttctcccgcaagctgttgaatataaagagacgatcgaggaagctgtcaaagggtctgacgccgtcatgattttaaccgactgggctgacattaaacaattcccgttagcggcttatcaggatttgatggaaacgccgctcatatttgacggcagaaactgctacacattggatgaggctttggctgcaggagtggagtattattctgtcggacggaaggcggttgttccgtcaggtgcaattcaatagatgaaaaagaaaggctggttgcgcaccagtctttttttcatctattgcggggtgctgaatacatttgctactatttaactattgtttggaaaattatgcagaagtagggcttctttaaacattcgtttgaaaaacattagaagaaaaccagaaaataaaaccttggagatgccggaaaaggagagaatctgatgaatcatctgcccgaaaaaatgagaccgtaccgcgacttgctggagaaatcagcgaaagaatacgtgaaactgaatgtgagaaaggggaaaacaggacgatatgacagcaaaattgccggtgatccctatttccccaagcatgaaacatatccgactgacgaaaatggacagccgatgaaacttctggcgcagattaatttctcgcacattccccagcttgacggctacccttcttcaggtatcctgcagttctacatttctgttcatgatgacgtctatggattgaattttgacgatcgatgtgaacaaaagaatttcagagtgatctattttgaaaatatcgtagaaaacgatgacgagcttgtttctgatttttcatttattggcacaggcgaatgtgattttccgattttatcagaagcggcagtcgagcctgtgaaatcttcggaatgggtgctgcctacagattttcaatttgagcagtatacgggcatggaaacaatggagttctttggtcagttcggcgaggatgaagaagacatttataatgaactggctgaaaacggatttggccataaaattggcggatacgcttcttttacccagcatgatccccgggaatacgcatataaagaacacaccatcatgctgttacaaattgattcagacgatgatatcgattcaatgtggggagacgtcggcatcgccaattttttcatcacacctgaagatctaaggaaaaaagacttttcaaacgttctgtacaactgggactgcagctaatacaagcttttgatccaaagggtcagaaggggggaataatagaagccaaatgacaaaatcagacatggccgaccagatgaagaacataaacatgaacaataagctcagcgccgaaagaggcagatcaacaacatctgcctctttcaagtgcctttataactatgacattaggtgatttcattttataaaacgcttttattagctgtataacgaacaaaaacaagatcaaatacctacatttcaagagcgttatatgcctaaattaagccatttaccctatttaagccgccttctggctattttaaaatataatatatggaaataaagtatggaaaagtctatcttcatcagcccctccatacgactttttgagtattaagaggtgattcagatgggttatgaaagtatgctagcggatatcaaaagttcgctcaacggaaaaatttcagacgtggaagacaagatcgaaaagctgaaaaaagcaaaaaaggacatagacacactgcaagaagaggcaatcactgaaatcaaagaaattgtgaaaccggaattgggcaagcattggacgggaacaaaagccgatgatttcgacaagggaagagaagaggcgaaatcggaagcatctaagattgtgaatgataaatataacgagtatatggcttcgattaacgggaaaatttttgatcttgaatgggataaagctaaatatgcatcggaattgttcatagcaaatggtgcagcagatcttcttaaaaagggagaagagttcgcggaagaagtcggaaatacaattagtaaactaaaatggtggtgatctttttttatgtcagaaattaagctgaagtacgacacagtcatcaaaacattagattctgtcaaagatgcgcttgctgacgtatcaatcggcgccgcaggatccaacggaaaaaacagcctcgattatacgaaaaaataccatgagcgtgaggagaacatcaaaaccatgctcggagattacaaaaaagcggtacagaaaaatatcgaggatacaaaggataacgtagattcactcaaagagcaggacgaggcgatagcggtaaaatagaacagaaagggcagtgcgatgagtaaagtatttgaatcaaaatctttaatcgaagaagcgaagagcagaaaaaagcaatatgagacgcttgaagagcagctgaatacgctgaaaaaagcgtttcagggagttgccgatttaggcgataattttaaaggaaatggcgcggacaatattaaagatttttttcagggacaggcagaaatcgtagacagctggctgacgcttgtctctgctcaaattgcgtttttaaacggcatttcaggagatattaaagatcaagaactgaatgattcatatgtggaaacttcttttttggatcatgagctgcccaatggagacctgaaagcctcagagattgtctccgctcataaagaagaaatcgattctattttgtcaggcatcagcgatattattgatctcgacatgtacacgcttgacgactatgcagataagatgggcgatgcccaaaaaatcagacgtgatacaatcacagctgtcgataagcttgatgaatccctgaccactgaatatcaaaatttagaatctctggacaacgcagtgctcaccaaatattctgttctcatgcaggccaccagcaatgggaagagcgcatcccctatgtactatgacaaaaaagccttccacagcaatgaagtctacaaaagcgtcattgaagtagaaaatcaaggaacaacctatatcgatgcaaaaacccagcaagcagaagcaagacggctccaggaaaaagccgaggaagaagcaaacaaaccgtggtacgaaaaaacatgggatggagtttgcaactttactggagaagtcactggctattatgattataaaagagcaaccgaaggcgttgatccggttaccggagaaaaactctccaccgcggagcgtgtgacagcaggagctatggccgctgccggattcataccagtcgtcggctgggcaggccgggccttcaaaggcggaaaagccatctacaaaaccggaaaagcagctatcgctgctgaacacgcattagacgcctacaaaacaggcaaatccttagacattctcaaaatgacagaaatgggcgcatacggccttgttgcgtcaaacggattctcagaagctgtcacaggccgggatatgttcggaaacaaagtgtctgaggagaagcggaagcaaggggcgctggaagctattactattattggtggagcaggattggcacactactttgatcggttgtaccaaaaaaatgctccatatgtcaataaagtgagtaatgaaagccttattagcaatattgctaagactactgaagaaaaacaaactaggcttcaatatttaagaaataagcatggtgtattgtctaaagaagatcttcaccatcgaataaatctaagggcagaagtactaaacgaacttagtagaattaaatcttctggtctaactaaaaaacaaagaggccctgcggtagctggtgtattggacaaaaaaacaggcaattattattttggaataaacaatatagatgggaagccacctaaggtactacatccacttattcatgatagaattgtaaatatgcctacagaacttaaagaaggttatataaagacgtcaggggcgggttctcatgccgaagttaatgctctaaatgaagcgttacttcaaagacctgatgcggatttaaaagatttaatggtatatgtagtaagtgctaggaaaataaataaaaagatgccagaaggtgtcccaatgcctagatgtccacattgtgaatatataactcaaaatacaaattatataccggaggctttaaagtatggaaaatgaatatgatatgaagagtataaaagaaaagggagtggactttgaggatttatggttctcttcggtaagtgatgagattttagataatcctgaagacgaaaatggccagccgtttacagggctggcttacgaattatatccaaatggtcaaatcatctattttactaaatataagaatggtctggcccatggtttaacatgtgaattttatgaaaacgggaataaaaaaagtgaaaaagaataccgatatgggcaattgcacggtataagcataatttggtttgaaaatggcaggaaaaaaagtgagcaacagtatgagcattccatactaatttctgaaaagaattgggatgaagaaggcaatctattaaataagtacgagatagatacagatagtcctcattttgaaatactagaatcgagaagagagactcacattaatttaggtcgagagtgagcaatcgttatgaaggtatttgatgtgcataaatttgatatgaaaaaggaacaagactttttacaagtgcaatttaaccttaaaaatcgtatcaacctatcccccacgatccatccagactccatcaacacctgcgcaggcgtcgacctggcctattgggagcaggatggagaaccatacggagtgtgctgtattatcgtaattgacgctgatacaaaagaagtcattgaaaaagtgcacagcatggggagaatcagcgtgccgtatgtttccggttttcttgcgtttcgcgagctgcccttgatcatcgaggcggcgaaaaagctggagacggagccggatgtcttcttgtttgatggcaacggatatctgcattacaatcatatgggcgttgccacccatgcggctttttttctgggcaagccgacgattgggatagcgaaaacctatctcaaaatcaaaggctgcgatttcgtgacgcctgaaattgaagtaggcgcatacaccgatattatcattgacggcgaggtatatggacgggcgctgcgaacgcggcgggacgtgaagcctattttcttgtcttgcggtaattatattgatttagacagcagctatcagatcacgatgagcttgatcaatcaagaaagcaggctgccgatccctgtccgcctggctgaccttgagacgcatgttttgcgaacgttttatcagaaaaatcacgtgtaacacttggggctctaagtcatcaagtgttttttttgtatgtgtgtgccctggtctcaaaaaccttgtcgtccttgtggagaggttttatttgaatgttttccgtgtcaaatcgataaaagcctttaatggcgcagacatccacttgtccttatgccatgctaattgagtgaaaacggggcaatcgctctgccaattgagttctttcatccggcctgctgcaatatcatcttttactgtcatttcaggcaagattccaatcccaagtccggccatcacgcattgtttgatggcttctatgctgacgaattccaatttgttaggatagataccggagtcatgcaaattgttctcaaagagcgtgcggtacgagcagccgtcctctgtcagcagaagagtttcgttttgaagatccttcaatgttactggtaaatccgcaggaaaaggatggtcattagcagccaccattttgatctcatcctgaatcaaagattcaacgtgcagtgcgtcttccatccggtttacatccaagatgaaggtgatatcaagctggccctgtaagagctgttctttcgcttgttcattggagatatatggtttgaatatgagctttacttggggaaaagcctgtttaaattcttttatgatagggggcaggcggtatgtgcactggctttccgtcgccccgatttttaaggttccggttgtttctcttacttgatttgtggccattttcgcttcttctgttaacgcaatgatcttctgtgcataagatttgaacgtttttcctgcttctgtcaagataagccgcttgccgagccgttcaaataaaggcgttccgatttcttcttcaagtgatttgatctgagaggtaacgcttgattgtgcataattaagcattttggcggttagggtgaagtttacatgttcagccgccgtaataaaggtgatcagctgcttcaattccacttgttctcttcctttctaaatcggttttagcgattggattaatcgaaataatcatctgtattgattgatgaatccattatatgatgaagaaaatcattcgtaaacaaaggagcagatgcatcatgaaaattgcggttattaacggcggaactcggtctggcggaaatacggatgttcttgcggagaaggctgttcaaggattcgatgcggagcacatttatttgcagaaatatccaattcaaccaattgaagatctgcgtcacgcccaaggcggctttcgtcctgttcaagatgactacgattctatcattgaacggatattgcagtgccatattcttatattcgccaccccaatttattggtttggcatgtcagggacattaaagctgtttattgatcgctggtcacagacgttgagagatccgagatttcctgattttaaacagcaaatgtcagtgaaacaggcatatgtaatagcagtgggcggagacaatccaaaaataaaagggctgccgctgattcagcaattcgaacatatttttcattttatgggaatgtcctttaaaggctatgtgctgggagaaggcaatcgtccaggcgatattcttcgtgatcatcaggcgctgtccgctgcgagccgcttactgaaaagaagcgatgcgatatgaagtttttgctgtcggtcattgctggcttgctgattcttgcactctatttattttggaaggtccagcctcctgtttggatacaagttgaaaccaattcgtcccagttgaagcaatctgtgagaatggcaggaaccacgctgcaagtcaagcacatgatcaagagtgacgcaggagaagaaacagctgtcatatcaaacggcatttctgggctaaaataaaaaagcacctgtccaggtgcttttttctataaataagggatcacaaggcccccatataaaaacgccgcaataatcaaaaatgccggatgcattttgaattttgtcatggcaaggagcgaaattcccgtaatcacgatcgattggacccagccgatcgctttgatgccgtctgcgccgatttgccaggtaagaatgagcatcatgaccgcgatgacaggctggacggacagcgtcatgcctttgatgacaggtgattggcggaagcgctggatgatgcgcagcaggacgatcaatgcgagcgccgacggtacgacggttgcgatcagggcaattaggaagccgggccacccgcctgcgctgtagccgacatacgcagcgattttcgtggcgatcgggcccggcaatgcgttcgcaagtgcgagcatatttgagaattgatcgtttgagagccagctgtatctgtttacgacttcttcaaacattagcgggatagacgcaggtccgccgccatatcccagtaggtttgcgataaaaaacgccataaataaatagatcgatatcatgaggctgacattcctttatcttttgaatgtttatttgtgattttgtctttcagtttaaaatgaaacgccccgtaagctaagaaaatgataatgaccaggccgggattaatctgtaaagtttgcaggccgataaaagcgatgataaaaaacaggatgccggtaacccagccgaaacctttaagcgctttttggccaaactcgtacgccatgattccgagcatgaccgcaattaccggcgtgacggcaccaatcatacctgcaacaattgctgaatggcttaacacatttacagccgcaaacaagcccaccatcgcaagacatgtaggcagaatgtgggcgaggatcgccacaattgcacctaatgtgccttttagcttaaagcccagataagcagccattttggtggcaatcggtccgggaagcgcattagcgattgctaatatttctccgaattcatcatcgtcaatccatttatatttattgaccgcttcatggcggatcagcggaatcacggaaggtccgccgccgaaccctaatatgccggtgcgaaccattgcggccgtcatatcccgataaggatggtttttcatttgtttctctcctttacagcttcattcccatacggcttttgtatcgtttgatcagcatctggcaatcaacactgacgacgcctcgcaatggatacagccgttttgttaagaattcttccatttcttgatcgttggtaaagatcccatgcatatgcagcttgctcgggcctgtcatgtgataaaggctggtgaccgcaggctcttcctcaagcttaagagcgacctcttctaaaaattgcggttctacctcgacattgaaaaacacggaaacatggatgccgattttagcgggattgatgacagcggtgaatttttcaataacaccggcttcaattaattggttgatacgggcctgaacggcgacccgtgacaaatcgactcttttgccaagatccgtataagaaattctgccttcttcatgcaaaatcgtgagaatttgtttatcagtctcatcaagtacaaggttggggatttgatattcatgactcaattgctccacctgctttcgtagccttttagcaatcattttatcataaaagttacgtatagaaataataatttttcatttgttttcgaaatgaatgcgaaaatatcttattatttgcgaaaagaagaaagttcgtcagtttttctgccggatcagtagatgtgaaaaatcaggctccctatactgaagaaaatttcttaaaaaaggggacttgtgatgaacaaatctgtcatcggtacaaagcaaatggtcgtcagtccgcattatctcgcttctcaagccggaaaccgcatactggataagggaggcaacgcgtttgacgccgctgttgcggtgagtgcttgtcttgcggttgtgtacccgcatatgaccggacttggcggggattccttttggctgacctttcaccaggaaacaaaggcagtaaaagtctacaatggcagcggccgttcaggaaaaaacgtaacgagagatgtatataagggaaaaagcgcgattccgctgcggggaattgacagtgctattaccgtgccgggaatggttgatagctgggatgcggtcctgaaggagtacgggcgtctgtctcttgcagatgtattggagcccgcacgcgattatgcccaaaatgggtttcctgtatcagctgatcagtgtcgtcacacagaaaagaatattgaactgctggcttccacgccttacacggctgacatcttcacgagaaggggcaaagcacctgtcccgggagagcggtttgtgcaaaaagagcttgcagacagtctgaacttgattgctgaaaaaggaagaagcgcattttatgaaggagatctcgctcagcggattgtctcacatttacagaataacggcagttacatgacaatcgatgattttaaagcgcatcggggtgagtgggcagcgcctgtatcaagtgattatcgaggatacagtgtgtatcaggcgccgccgaattctcagggatttaccggtttattaacactgaacattttggaaaactatgatttcacccaaatcgaacacggttcatttgagtattatcacgtgcttgtggaggcattgaaaaagagttttctagatcgggatgccgtcctgactgatccggcgtttgcagacattccgcttgaaaggcttttggacaaacgttatgcaaaacaattggcagaagaaatcggctatctcgcaataccggcagaaagcaggccggtgggaagtgatacggcatatgcggccgtaatcgatgcggatggcaacgcagtgtcattcattcaaagcctgtactttgaatttggctcggcagtcactgccggtgatacaggcatattactgcaaaaccgcggatcgtttttctcactggatgaaaatcatgtcaacacgcttgaaccgagaaagcgcaccttccatacgttgatgccggctatggtctgtaaaggcggaaagccaaaaattctgtacggcacacaaggcggcgaaggccagccgcagacccagacggccatcattacccgaatgctggactacggaatgcatccacagcaggcaatcagcgaaccgcgctgggtatggggcagaacgtggggagaggaatacgaaggtctcagagtcgagggcagattcacagacaaaacaatccaaaaactgaaagacagcgggcatctcgtggaggttgtcggtgactatgatccgctgatgggacaagcggctgcaatcaaagttgatgaagaaggctttctccaaggcggagccgatcctcggggagacggagcggctgtggggatttaaataactatagggtacaaacataaatcaaaagcataaacataagggagacctctacaatgtggtacatatactgtttatcttcaggtctataatgccactccataaaaatacgtattgagtcaatcacaataaaaaataaaagaagcaaatattcaactggaaaaaaggagagtgaaaacacaaacaaaataagtaaagtgatttcgatccatttgtgtgtattgctgacatgcttatatcgccagccggatttatcaataccgtattttttctttataaaaaattgagaggcgagactgatggtaatagcgatcagcattaaaatccaaaagtttgtcattccaattcctcctaatctacctttatacgaagaaaaaggaaaaacgtttcataaaagaacaccccgagcttgctctgggtgttcttttttttgatattttttcagttatttacaggcgatattttgtaatcataaggtctttttgactagtttcttctatttaaatagtccttctcttcagctgggacgaatcagtgtgaattcttcccccagcttggcatagtgatttcccgccaatcgtgaggcaggctttaattcatccgttaaaatatatcccttttctgcatcatacaccttttcatctaggtggaagcagacaactcttccgatgagcagatctgctgtagtgatgccttgatcattgtcaaaggtaatatgccgctctaatttgcactcaaagcgaacgcgggcttccttaatgccgggaactgaaacagctttgctttcaacaggatgaagcgaggtgcgtgtaagctcgctttcatccggccttaagcttgcagctgtttcattgatatcttcaatgatggcttcatcactgacatgaacgacaaattctccgttctccactgcgtttcgtgctgtatctttttggcgtccttccgtcctgttaacagaaatactgagaagcggaggatctgagctgacgacgttataaaaactgaaaggcgcggcatttaccgctcctcctgaagaaagtgttgtcacaaatgcaatggggcggggaataacggtacctgacaatagcttgtatgtgtctttggcactaagctgatcagcttgaaatatgtacatagcaacaaccgcctttatcgttaggataccttgattataacgaaatggtttaaaggaaaccaaatgatgcgggttgcatatgttatgtcatgacatatatctaatacagggcaaataaaaaaataggcttccgtacctccgccggcagcctattgaaacaatgaaaacttagattatttgtatttctttttgactacccagcaattgccgtctttccagtattcttttttgctgtcataatcatcgtgtcttttgtagtcgtcgcagtggtggtgcggttttttgtagtatttcttatgggaacgataagattttttgtgtgtgcggcatgacttcttatagctgcgagattttttcttgtgagaacagtaagactttttgtagctgcgagattttttgtaagaacggcaagattttttatagctacgagattttttgtaagaacggtaagattttttatagctgcgagattttttgtgagaacggtacgattttttgtggctgcgagatttcttgtgagagcagtatgattttttgtggctgcgagattttttgtgagaacagaatgattttttgtgactgcgagattttttgtgagagcagtatgattttttatggctgcgagattttttgtgagtgcggtgcgactttttatgactgcgtttttttccatgaggctcttggtataaataatcctttaaaccttctttttttgcggatttcaccgcttcttcgatgtcagaatgggaatagtggcccaatttgaaatcctccttttaaaaatatgttaaggatgaagatccttactaccctcatagtacgcgcggttttaaaaagtgtataagtgttccgctgagatcttataaaaataaaagcctaaaatttgtaaggaggattatggatgaagaatcaatccaatttaccgctttatcagctgtttgttcatccaaaagacttgcgtgaattaaaaaaggatatatgggacgatgatccggtgccagctgtgatgaaggtaaatcaaaaaaggctggatattgatatcgcttatcggggatcacatatcagagacttcaaaaagaagtcataccatatttccttttatcagccgaaaacattccgcggcgcgcgagagattcacttaaatgcggagtataaagacccttccttgatgagaaacaaattgtctctggattttttctcggagctagggacactgtctccaaaggcagagtttgcgtttgtaaagatgaatgggaagaatgaaggggtttatcttgaacttgaatccgtagatgaatattatttggcgaaaaggaagctggctgatggcgcgattttttatgcggtggatgatgatgccaacttttctctgatgagcgatttagaaagggaaacgaaaacatcgctggagcttggatatgaaaagaaaacagggactgaggaagatgatttttatttacaagatatgatttttaaaattaatacggtccctaaagctcagtttaagtcagaagtgacaaaacacgtggatgtcgataagtatttgcgctggcttgctggtattgtattcacctcgaactatgacgggtttgtccacaactacgcattatacagaagcggggaaaccggattatttgaggtgattccttgggattatgatgcgacttggggcagggatatccatggagagcggatggctgccgattatgtaagaattcaaggatttaatacactaaccgcccggatattggatgaatccgagtttcgcaagtcctacaagcgcctgttagaaaaaacgctccaatctctttttacaatagaatatatggaaccgaaaatcatggcgatgtatgaacggattaggccgtttgtcctcatggacccgtataaaaagaatgatattgagcgttttgaccgtgagccggatgtgatctgcgagtatattaaaaaccgttcacaatacctcaaagatcatttaagtattttatgaatgcgtgaaaatgggtattcgcggaaaaagcgacaattaggctattgaattagttcaacaaataaatgtgacacgtatatatgcagtatgtttatcatctatgtataagtgactaggaggaatttgaatgagcaagaggagaatgaaatatcattcaaataatgaaatatcgtattataactttttgcactcaatgaaagataaaattgttactgtatatcgtggaggtccggaatctaaaaaaggaaaattaacagctgtaaaatcagattatatagctttacaagctgaaaaaaaaataatttattatcagttggagcatgtgaaaagtattactgaggataccaataatagcaccacaacaattgagactgaggaaatgctcgatgctgatgattttcatagcttaatcggacatttaataaaccaatcagttcaatttaaccaagggggtccggaatctaaaaaaggaagattggtctggctgggagatgattacgctgcgttaaacacaaatgaggatggggtagtgtattttaatatccatcacatcaaaagtataagtaaacacgagcctgatttgaaaatagaagagcagacgccagttggagttttggaagctgatgatttaagcgaggtttttaagagtctgactcataaatgggtttcaattaatcgtggaggtccggaagccattgagggtatccttgtagataatgccgacggccattatactatagtgaaaaatcaagaggtgcttcgcatctatccttttcacataaaaagcatcagcttaggtccaaaagggtcgtacaaaaaagaggatcaaaaaaatgaacaaaaccaggaagacaataatgataaggacagcaattcgttcatttcttcaaaatcatatagctcatcaaaatcatctaaacgatcactaaaatcttcagatgatcaatcatccaaatctggtcgttcgtcacgttcaaaaagttcttcaaaatcatctaaacgatcactaaaatcttcggattatcaatcatccaaatctggccgttcgtcacgttcaaaaagttcttcaaaatcatctaaacgatcattaaaatcttcagattatcaatcatcaaaatcatctaaacgatcaccaagatcttcagattatcaatcatcaagatcaccaggctattcaagttcaataaaaagttcaggaaaacaaaaggaagattatagctatgaaacgattgtcagaacgatagactatcactggaaacgtaaattttaatagataatggaggagcatcagataaagtgatgccctttttcagttaaaggaggagaatcgtgaaaggtttgaatcaattccttaacacagatgttgaggttgtcatttcaggagatacaaggtttgtcggcaccctcatagatatcggacaggatatttttgttatttttgatggctgcaattatctttatattcccttgttgcatcttcatcaaataaacaaggcgaaaatagtgaccagtactgagaagccatttttgatcaatccggaagatccaatgatagaggcagaaactcaagctttttcatatagaaatacattaaacaaggtcaaaggccagtttattgaagtttatgtaactgggggtcgatcgatccatggatatgttacaaatgttttaaacgattatattgtatttttctcacccgtatttaaaatactttttatatctatgcatcatttaaaatggtttaccccttattcaactgaacaaacaccgtatactcttgacaactcacaattgccggtcgtgccttccaaagttcctcttgtgcgtaattttgaggagcagatcaaaaaaaatattggtgaattggtcatatttgatatgggagaggtgccagaaaaagtcggactattaaagggtgtctctaataatatcattgagcttattaacgcaagtggagagccagtcatttggaagttaaatcatctaaagacaatgcatcttccctagtgtatacaaaactgccctcttgaaaagcagaaggcagtttttcgtttcatactgtgctaaagaaataaccaactgatccaaaaatataaacatgttaacgtaaaaagaacagtcagcggaatgatgataatggtcgtttttatatattcgccccatgaaatactttcatcatgctgttttaatatatgcatccaaataagcgttgctaaggttcccataggtaataataatgaaccgatatcactgccgataatatttgccaagtagatgatttttgttgttgaaggattcagggtcatttcagttaaggtaaaagtactgatcattaacgctggatggttgttaaagagattagaaaaaactgaagtagagatacctgatgcgaaagttgcatgggcgaggcttccagaaaccacaggttcaaaataactcacaagtaactctgtgaatccaatattatgcagaccataaattaagacatacatagtaaaagcgaatataaaaatgtgccaaggcgatttatataacaagtctcttggggaggttttgaaataaatccatctccagctcaacaggataaaagatccgatgacagcgactagaggaacagaaataccggtatatgatgctgcaaatagactcattctgacgagaaaaacaaatgcaagcacaaacaacatgatttttgtttgatttcgttctggtaaaggagctgatggcgaatgaagaggatggtaccttctatgccgcagagactgaaaatggcccggtatatctggcaggcttttgggaagacgtttataaaagaacataaacagtagacaagtcataaaaatgagtcccatcatactagggacaaacatcatggcggtgtgaagatatagatccattccaatgattttgagagaaattaaattaacaatattacttacgccaatcggtgcgctagaggctgtggctattaaaacaccgcttaataaatatggggctttttgatgtttttttaaacctaaatattttagtacaagcaaaaggattggagttgtgatcaaaatgctcccatcattattaaggaaaatggtcatgagaaagcagagcaaattggttagccaaaaaagcttgatgcctgaacccttggattgttggagcagttttgcagccacccaataaaagaaaccaaagctttctagtgcaatggccataatcatagtggcaaggattgtaaccgatgcacccgtgacttttgttccgatttcccctaagtctgccaatgacacacttccgcacaataaaaccattaaagcgccaaatgtggcggggatagcttcatttagtccttttggtctccagaaaataaaaatcattgttacgaaaaaagcgagcaatgtgaatatgccggtgaactcaataatttacttcacctctctatctttcatttttaaaatcaaactaatgtcctgcgcttactgatgtccttgccaactatttgtactgtatgtatacgtatactgatataaagttgtactaagcgattatattaaattaataaaaattccataagaatcccaaaagaaaaaagagattgcaagtattgttcatgtacctgcatcactctctttagttcttgtctgctgacaatttgaaatatgaataaaatgctttataagcggattatgattgtctttgcggtaagcgataacccattctgcattaagctgtatttggtccatttttcgataagtaacatccaaattaaataattttttggccgaggaaggaacaaatgtcataccaattccggcactgactaaaccaatcaccatttgatattctgtggcttcctggacaatgttgggtctgaagcccgcttgttcacagaactgaataaaatccatgtatagagtaggccatgcttctttagcaacagtaataattggttcatctcttaaatcctcaatcgtaattgattccttagaagtcaatgggtgttgcttaggcaaagctaaaacacaagggctgctttgggcggtttcgatatgtaaagctgtatgctgtaagggaggatgaagtataccaatatcaatgttgccctttagtagctcctcctgctgcctagacgaggatatttcacgcagttctattttcacagatgggaattttttacgatattcccggacaatcggcggcagaaattcatatgtagctgatccgacaaaaccgattacgagaaggccttgctcgccgcgggccgtccgctgtgccagttcaattccttgtccgatttgcatcaatgccatgcggcaatgatttaaaaagatttctcctgctgcggtaagctcgacaaatcgttttgtccttttcagaagcgtaactccgacttcttcctccagctgtttgatctgctggctgagaggaggctgcgtcatgttcagccgccgggcagcctttccgaaatgaagctcttcggctactgcgataaagtattgaagatggcgaagctccattcaatatgcattcctttccataggttaataattcgtattacatattaatcataaggcgaatcgatattggaggtcaatttccaaagagtgtatagtgaaacttatcacaagatatttaaaattttacgtttaaaatgcataataaggagtgagggtgttgacaaaagcaacaaaagaacaaaaatcccttgtgaaaaacagaggggcggagcttgttgttgattgcttagtggagcaaggtgtcacacatgtatttggcattccaggtgcaaaaattgatgcggtatttgacgctttacaagataaaggacctgaaattatcgttgcccggcacgaacaaaacgcagcattcatggcccaagcagtcggccgtttaactggaaaaccgggagtcgtgttagtcacatcaggaccgggtgcctctaacttggcaacaggcctgctgacagcgaacactgaaggagaccctgtcgttgcgcttgctggaaacgtgatccgtgcagatcgtttaaaacggacacatcaatctttggataatgcggcgctattccagccgattacaaaatacagtgtagaagttcaagatgtaaaaaatataccggaagctgttacaaatgcatttaggatagcgtcagcagggcaggctggggccgcttttgtgagctttccgcaagatgttgtgaatgaagtcacaaatacgaaaaacgtgcgtgctgttgcagcgccaaaactcggtcctgcagcagatgatgcaatcagtgcggccatagcaaaaatccaaacagcaaaacttcctgtcgttttggtcggcatgaaaggcggaagaccggaagcaattaaagcggttcgcaagcttttgaaaaaggttcagcttccatttgttgaaacatatcaagctgccggtaccctttctagagatttagaggatcaatattttggccgtatcggtttgttccgcaaccagcctggcgatttactgctagagcaggcagatgttgttctgacgatcggctatgacccgattgaatatgatccgaaattctggaatatcaatggagaccggacaattatccatttagacgagattatcgctgacattgatcatgcttaccagcctgatcttgaattgatcggtgacattccgtccacgatcaatcatatcgaacacgatgctgtgaaagtggaatttgcagagcgtgagcagaaaatcctttctgatttaaaacaatatatgcatgaaggtgagcaggtgcctgcagattggaaatcagacagagcgcaccctcttgaaatcgttaaagagttgcgtaatgcagtcgatgatcatgttacagtaacttgcgatatcggttcgcacgccatttggatgtcacgttatttccgcagctacgagccgttaacattaatgatcagtaacggtatgcaaacactcggcgttgcgcttccttgggcaatcggcgcttcattggtgaaaccgggagaaaaagtggtttctgtctctggtgacggcggtttcttattctcagcaatggaattagagacagcagttcgactaaaagcaccaattgtacacattgtatggaacgacagcacatatgacatggttgcattccagcaattgaaaaaatataaccgtacatctgcggtcgatttcggaaatatcgatatcgtgaaatatgcggaaagcttcggagcaactggcttgcgcgtagaatcaccagaccagctggcagatgttctgcgtcaaggcatgaacgctgaaggtcctgtcatcatcgatgtcccggttgactacagtgataacattaatttagcaagtgacaagcttccgaaagaattcggggaactcatgaaaacgaaagctctctagcactctgcgcatcacgacactgttttatgaacagcactaaataaaaggagtgaagggaaatatgaaacgagaaagcaacattcaagtgctcagccgtggtcaaaaagatcagcctgtgagccagatttatcaagtatcaacaatgacttctctattagacggagtatatgacggagattttgaactgtcagagattccgaaatatggagacttcggtatcggaacctttaacaagcttgacggagagctgattgggtttgacggcgaattttaccgtcttcgctcagacggaaccgcgacaccggtccaaaatggagaccgttcaccgttctgttcatttacgttctttacaccggacatgacgcacaaaattgatgcgaaaatgacacgcgaagactttgaaaaagagatcaacagcatgctgccaagcagaaacttattttatgcaattcgcattgacggattgtttaaaaaggtgcagacaagaacagtagaacttcaagaaaaaccttacgtgccaatggttgaagcggtcaaaacacagccgattttcaacttcgacaacgtgagaggaacgattgtaggtttcttgacaccagcttatgcaaacggaatcgccgtttctggctatcacctgcacttcattgacgaaggacgcaattcaggcggacacgtttttgactatgtgcttgaggattgcacggttacgatttctcaaaaaatgaacatgaatctcagacttccgaacacagcggatttctttaatgcgaatctggataaccctgattttgcgaaagatatcgaaacaactgaaggaagccctgaataaaagaaaaaaagaaagccccttttagcagggctttctttttatttggctcttttcctgattttagataaaataacatcaaaacagtaaaggtgtggtctgatgaaaatattggttttggcagtgcatcctcatatggagacctcagttgttaataaggcgtgggctgaggaattgagtaaacatgacaatatcacagtacgggatctttataaggaatacccggatgaagcgatagatgttgcgaaggaacagcagctgtgcgaggaatacgatcggattgtctttcaattcccgctatattggtacagctctccgccgctcttgaaaaaatggcaggatcttgtgctgacttatggctgggcttttggttcagaaggaaatgccttgcatggcaaggagctgatgctggctgtatcaacagggagcgaagcggaaaaatatcaagcgggcggagcaaatcattactcgatcagtgagctattgaaaccatttcaggccacgagtaatctgatcggcatgaagtatctgcctccatatgtgttctatggcgtgaattatgcagctgcagaggatatttctcacagtgcaaaacggttagccgaatacatccagcagccttttgtttaaaatacagccctgtccaacatacggcagggctgtatttgtttaaaaatccggcagctcagacaggttattttccttgatgccgtccggttcacttcgcaaaatgtcacgcccgtatttatggaagacatcaacatgagcgagttttcctgattttgcttctgacagcgcagtagggtagtcgagctctcttcctgtattggttttcactgcgataatattgtcttcctcatttcttctaaccgcaataatttcttcttttccagatggaacattttcttgatcggcagttgtttgccgggctttatacgattcatatgctgcttcaaattgatccatatttacacctccgctttttagcgtgaacaaaaatgtcgatgatcatgtaaggtttcgacacagcatacgacaatatttcctgagaaatatcttgggaatgtgacaaatcaattcataataaaagggattccgcatttatgcggaatccctctcagttattttgtcatgtgtaaatcctttgttttcatataacctgtcgtaccgccgtaatcaacgaatacccaatcaaaatcaaaaccgcctttattcgttttactccagcctaaaaaagaaacgcttgtgtctgctggaagagtcttaatgctctttccgtcagcggatgtatacacttttgtttttgttttggtttttaccgttgtcgctgctttaacaatgtaatgagtggatacaaatcctgtttttccatttttatacttaacctttgcccagtcagcatttgagaaggaaatcagctttaggctatctcctaagtgcagcgtatcggctttctggcttgatgcggaaggcttcgttctgacatttagagcctctgctgataccaaataagaatcaatcggataactgtataaatcatcaatgcttaccgttgtttctggctgttgagcatggatcgtgccagcgccgccagcagccgccgcagtcattccagccgcaagtgctaatgttgaaaatagttttgttggtttgttcatgccgttcctctcctcacgtaagagaaataattcattctatatctctattcacgttatcgcaggttcctaaacatcagacaattatttttgtgtttctagtttgagaggcgcggatattgttttttgcacttttttcccgtgcaaaatatcatctgctgcttctgtagccaatttaccgattaattcaggctgctgagcgacggtggctgacagctttctgtctttaatggaagcgagcgcatctttattgccgtcaaaaccgatcaccaatatgtctttccccgagctgttaattgcctcgagagcaccgagcgccatttcatcgttgtgagcaaaaacagcttggatatcaggatgtccctgcagcaggttttccatgacagtcaggcctttcgtgcggtcaaagtcagctgattgttttgtgacaacttggagcttttggtctgcgatgttatggaatcctgagccgcgttcccgtgtggcagatgcgccggggacgccttcaagctctgccacctttgctccttttccaagtttgtcggcaataaacgccgcggccatttcaccgccttttacattatcggaagcaacgagggtttcaacttttccttgttccgcagatcgatcgattgttacgacgggcacaccgactgcgtttgcagattctactgccgttgagatcgccgaagaatcagtcgggttgattaataatgcatcaacaccttgctgaattaaatcttccacgtcactcgtctgtttcgatgaatcattttgtgcatcaacaatgatgactttcattccccgttttttagcttctttttcgatacccttttttaatgagacaaaaaaaggattattaagcgttgagacggacaagccaatggtgaattcctttttgttccccgagtttgatggctttgcccattggggaggctcaagcgaacaggcggttaacaaaaataatgataacgttaaaatgacggatacagcctttttcatgtaaaaccctcctaagctgacttcttgcggtctaacaataccgcaattaagataacaatccctttgacaaccagctgataaaatgatgagacgccaagcagattaagtccgttattaagtgtgccgatgatcagcaccccgattaacgtgccgacaatgcgtcctcggccgccggaaagacttgtccctcctaagacgactgccgcgatagcatcaagttcgtacgattctcccgcagtcggctgggccgaatgcaggcgggaagtcaatatggcacctgcaagagcggataaaagcccggctaaagaatagatcatcactttcacgcgcgtcactttgatgcctgaaatgagcgcggctttttcgttgccgccgatagcgtacgttcggcgtccgaatggtgttttatgaagaagcacccaaaggatgacaaaggcaagaaccatcgtaattgccggtacaggaatgcctaaaaagtaaccgcgtccgaacatctgaaaaccgtagtttgtgccaagtccggtaatcggatttccatctgtatacactagcgtcagtccgcgaaacacagtcatggtcgcaagcgtggcgataaagggcgccatttttcctttagtaatcaataatccgttgatcatgcctagtacggcaccaatgatacagccaaggatgatcgcgagaaccggatcgacaccggacacaatcatccccgcaactaaagcactggacagggcaagaatagcgccaacagaaagatcaatgccgcctgtcaaaataacaaaggtcatcccgaacgcgattaatccgttaatggcgacctggcgaagcaggtttaaaatattcagcggttcaagaaagctgggatttaaaatagatacaatgataacgagaataaataaaccaagaaacgggccgagtttttgcatgactccgtcgaagtgaatccgtttttgttctgtttgcagttgttccgttttcatattaccgccctcccgtggcaagtgtcataattcgttcttgtgttgcttctcgcgcatggatttcgccgctgattctgccttcatggacaacgataatccgatcgctcattcccagaatttcaggaagctctgatgacaccatgatgatagcgacaccgcgttcggtcagctcattcatcagcgtataaatctctcgtttggcgccaacatccacacctctggttggctcatccaagataagcactttcggtccgatgccgatccacttggctatcaccactttttgctggtttcctcctgataaatggcgtgcgtgcgtttccggtgatgctgttttgatagtgaggcgcttgattaacagatcgacaaattcagcctcccgcttatgatcaatgagaccctttggtgagaagctggacagattgggcagggcaatattttcgcggatcgaggtgtcgagcaggagcccttcatccttgcgattctctgtaataaagccgagaccttttttcacggcttcctgcgggttcttaatagccgtttttttcccagcgatccatatctcacccgtgtccagcctgtcaacgccgaacagcgctctcatcatttctgtccggccggctcccattaatcctgaaacaccgacgatctcaccggaacgcacataaaagctgacgtcctcaaaactcccttttacggaagcatttttcacctcgaatactttgtcaccgagagaaggagtgcgttttggatatcgttcagtcagctcccgtccgaccatttttttgacgacttcatcaaaatcagtttctgagatgtttgttgtatctaccgtttttccgtcacgcatgatggtaattctgtcgcaaatcgcaaaaatttcttccatgcgatgcgaaatatagacaatggagacgccgttcttttttaacgctgtaatgacctcaaagagcttgctgatttcacgttcagtcaacgctgcggtcggttcatccataatgattacctcggcatttgtcataagcgcttttgcaatttcgatcatttgctgctgtccgacggaacattcgccggcttcttgatcaagagaaagagagacggaaagtttgtcaaattgctcttttgctagcgctttcatttttcttgtttgtaaaacgcccagcttggaggatatctctttaccgataaatagattctcaagaacggtcatttccggccagatattcaattcctgatggataaaggctattccatgctgttccgcttctttcggattggaaaaatacgtttcgtttccgtttatgctgatttgacctttatctgctttgtgcaggcctgtcaaaatgttcataagcgtggacttgccggcgccgttttctcccattaatgcgtgaacctcgccaggcatgagctgaaaggaaacgcctgacagcacctgattttttccgaatgttttatgaatgtctttcatttcaatctgcatgtttcatcttcctttctagaaaagtacacctgcctgcaggatgcagttggcatatggtgtgaattctcctgttcttatgactgcctttgcatcttttgtcagcagcttaaactcctcgtgagaaaggtattcaatctcttgttcagagaaaagattttctagaaatttcgcattctcctgattggatgcttttatttcagctgcagcaatgactttttcgaccgccatttcctcagccagtactgccgctgtatcttggaaagccggaaggcccggcttcagtgaaagatcaattttcaaaacgccgtcaggaaccggcagtccggcatccgcgatgacaattttatcagtgtggccaaggtcggctaaaatcttggcaagatggctgttcagtataccgtgttttttcatgacagcagctcctctacttcatttcttgtcggcattccgccttgggcaccgaaggagcagacagaaagggaagcggcacgattggcaaaccgcaatgcggcttcaatgtcttttccctcagccagggccacggcaaatgctgcgttaaacgtatcaccggctccggttgtatcaacgggttctacagggaaggacgggatgagcacctctttgctgccagccgaatagcggacgccttgttttccttccgtaataaagagctttgccggataaagcgccagagcttcggaaatggtaagctcagggaataaaatcgaagcctcgtgttcattcggcgtcagataggtagcgtgatcaattgtttcctgcttgagcgggcgggccggtgctgggtttagtatgatcgggatatcgtgagaatggcagtatttgcacacctcatcaaccgtttcttctgggatttcctgctgaatcagcaccatatcgaccttttcaatctgttcgagcgcgtttaacgcatacgctggggtgatgtcatcgttcgcgcctttgacaacgacaatgctgttgtcgccttcagcaagcacaatatgagcggttccgctttccgtatgtgtaaccggttccatataatcagtgcgaacgccgttagctttgagattattcaaaatagctgttccataatgatcgtctccaactttgccgaccataaacacttgcgccccaagtctggctgcggcaacggcctgatttgctcctttgccgcccggcacagtctgaaatgacgtgccaagaaccgtttcaccggcttttgggcgtttgtccgaggtgaccactaaatccatagaacagctaccaatcacacaaatattacgcatcttaatcttcctttcttgtcgtctttcttcctatataggtgacaggcatttgaattgccgtttctgccagcggctgttttttaatgatacccaaaagcagtttggcagcttctttccccatatcatatgcgggctgtttaattgtagaaagtggcgggaacagaagtccgctttgcggaatgtcatcatagccgataatttgaatgtcctccggcacgttttttccgcgccgcaatgcttcatgtaaaacggcagcggcttgaatatcattactcgcgatcacaccatctgtcgctggataagaggcaaacagctccttcgccatcgattgtgcatctttaattgaaaatgaagctgtctcaatgacctgaaaatcaacttcagcctgctttaagatttccaaagcgccgttaaatcggtcttgagcggtcggcaggtgagcgggtcctctcaagagcgtaatgcgctggctttttccgtgaatgatagcctgggcggctaactttcctcctgtatagccgtcactggacacagaaggagccccttcaagcgttctgtccagaaaaacaactggataattcatgccgctgtattcctcgagatccgggtaattcgttgcggcaataatgcctgcgacatgattttgcttaaaggtttgaaggtattcaagttcttttttcaattcctcgtcactgttgccgaaaataaggcgatagccttcccggttcaattcatcctccgcaccgcgggcaagctgggggaagaaagggtttgtgatatccgggagcaaaagtccgatcagtcgggattctcttttatatagagatctggcgacttcattcgggtaatagttcagcttcgccatcgccgctatgacacgcgttcgcgtttcttcgtgtacatagccgttatcattcaggacgcgggaaaccgtcgcaactgaaacgcccgccgctccggcgacatctttaattgtagccaaaacagctcctccttgtttatgtaaccgtttacatagatagattatcatgaacaatccgaagttagcaataaaaatatcaaaagaaatctaattgtaaattgtatatataattgaaaaatttaaggttttcactctttttttgacaaagtcttcacaaatatggatgaagatttcttgaacaaatattaagttttattaaaattgtttcaaagtcatgcgtttagacctgtaaatggggagaaacagaaaagactatcatcccagaaaatgtttaattatgttagagaattcggactcgtatgtttagcgttttcatctcgaacctccttagtcattttggaatgggcctcatattgcttattccatgcagaaaggatgacattatgaccttgtccttaagaaacaggataaaattattttgtgttcataagaaccggaaacacgcatgatagcaggaaatgcttgataacaaaggctgaaaaaaagattgatttgaaatgcatattaaatacaaacagcagggtgtgactatacgtccagaaggatatcaggagaaaaatgaaagcgcattctctttgatttttttaaaaagtgataaggtataagtcctgctgttttccaaaaatagaaaacagtttgtaggtataaaatctctttcaaaagagaagtttggcttagtcgattagggaagattatgttacataatgccgattgagaattcatagtgattctatatactgatgaatgaatttacaacaatatagaaggagatgtcgaaaagcaatgtggttactcattatagcctgtgctgtcatactggtcatcggaatattagaaaaacgacgacatcagaaaaacattgatgccctccctgttcgggtgaatattaacggcatccgcggaaaatcgactgtgacaaggctgacaaccggaatattaatagaagccggttacaagactgttggaaaaacaacaggaacagatgcaagaatgatttactgggacacaccggaggaaaagccgattaaacggaaacctcaggggccgaatatcggagagcaaaaagaagtcatgagagaaacagtagaaagaggggctaacgcgattgtcagtgaatgcatggctgttaacccagattatcaaatcatctttcaggaagaacttctgcaggccaatatcggcgtcattgtgaatgttttggaagaccatatggatgtcatggggccgacgcttgatgaaattgcagaagcgtttactgctacaattccttataatggccatcttgtcattacagatagtgaatataccgagttctttaaacaaaaagcaaaagaacgaaacacaaaagtcatcattgctgataactcaaaaattacagatgagtatttacgtaaatttgaatacatggtattccctgataacgcttctctggcgctgggtgtggctcaagcactcggcattgacgaagaaacagcatttaagggaatgctgaatgcgccgccagatccgggagcaatgagaattcttccgctgatcagtccgagcgagcctgggcactttgttaatgggtttgccgcaaacgacgcttcttctactttgaatatatggaaacgtgtaaaagaaatcggttacccgaccgatgatccgatcatcatcatgaactgccgcgcagaccgtgtcgatcggacacagcaattcgcaaatgacgtattgccttatattgaagcaagtgaactgatcttaatcggtgaaacaacagaaccgatcgtaaaagcctacgaagaaggcaaaattcctgcagacaaactgcatgatctagagtataagtcaacagatgaaattatggaattgttaaagaaaagaatgcacaaccgtgtcatatatggcgtcggcaatattcatggtgccgcagagcctttaattgaaaaaatccacgaatacaaggtaaagcagctcgtaagctagggggaaatgcagacatgttcggatcagatttatacatcgcactaattttaggtgtactactcagtttaatttttgcggaaaaaacagggatcgtgccggcaggacttgttgtaccgggatatttaggacttgtgtttaatcagccggtctttattttacttgttttgctagtgagcttgctcacgtatgtcattgtgaaatacggtttatccaaatttatgattttgtacggacgcagaaaattcgctgccatgctgataacagggatcgtcctaaaaatcgcgtttgattttctatacccgattgtaccatttgaaatcgcagaatttcgaggaatcggcatcatcgtgccaggtttaattgccaataccattcagaaacaaggtttaaccattacgttcggaagcacgctgctattgagcggagcgacctttgctatcatgtttgtttactacttaatttaatgtaaggtgtgtcaaacgatgaaaaaagaactgagctttcatgaaaagctgctaaagctgacaaaacagcaaaaaaagaaaaccaataagcacgtatttattgccattccgatcgtttttgtccttatgttcgctttcatgtgggcgggaaaagcggaaacgccgaaggtcaaaacgtattctgacgacgtactctcagcctcatttgtaggcgatattatgatgggacgctatgttgaaaaagtaacggagcaaaaaggggcagacagtatttttcaatatgttgaaccgatctttagagcctcggattatgtagcaggaaactttgaaaacccggtaacctatcaaaagaattataaacaagcagataaagagattcatctgcagacgaataaggaatcagtgaaagtcttgaaggatatgaatttcacggttctcaacagcgccaacaaccacgcaatggattacggcgttcagggcatgaaagatacgcttggagaatttgcgaagcaaaatcttgatatcgttggagcgggatacagcttaagtgatgcgaaaaagaaaatttcgtaccagaaagtcaacggggtaacgattgcgacgcttggctttaccgatgtgtccgggaaaggtttcgcggctaaaaagaatacgccgggcgtgctgcccgcagatcctgaaatcttcatccctatgatttcagaagcgaaaaaacatgcggacattgttgttgtgcagtcacactggggacaagagtatgacaatgatccaaatgaccgccagcgccagcttgcaagagccatgtctgatgcgggagctgacatcatcgtcggccatcacccgcacgtcttagaaccgattgaagtatataacggaaccgtcattttctacagcctcggcaactttgtctttgaccaaggctggacgagaacaagagacagtgcactggttcagtatcacctgaagaaaaatggaacaggacgctttgaagtgacaccgatcgatatccatgaagcgacacctgcgcctgtgaaaaaagacagccttaaacagaaaaccattattcgcgaactgacgaaagactctaatttcgcttggaaagtagaagacggaaaactgacgtttgatattgatcatagtgacaaactaaaatctaaataatcggagtgataaagatgaaatttgtcaaagccatctggccgtttgttgccgtagccatcgtgttcatgtttatgtcagcttttaaattcaatgatcagctgacagatcaggaaaaacagaagattgatatggaaatgaataaaatccagcagcaggaagaaccggtaaacgccaataaataattcaaaaaagagagtgtctgatgagacactctctttttatttgcccagcatattcattctgtaaaaatattaaaaagtctcttaacatattcaaaaaaataccgatgttaaaactgcaaaaagaggaggagataataaaagtgaacacactggcaaactggaagaagtttttgcttgtggcggttatcatttgttttttggttccaattatgacaaaagcggagattgcggaagctgatacatcatcagaattgattgtcagcgaagcaaaaaacctgcttggatatcagtataaatatggcggggaaacgccgaaagagggtttcgatccatcaggattgatacaatatgtgttcagtaaggctgatattcatctgccgagatctgtaaacgaccagtataaaatcggaacagctgtaaaaccggaaaacctgaagccgggtgatattttgtttttcaagaaagagggaagcaccggcactgttccgacacatgacgccctttatatcggagacggccaaatggttcacagtacacagtcaaaaggggttatcatcaccaattacaaaaaaagcagctattggagcggaacttatatcggggcgagacgaatcgctgccgatccggcaacggctgatgttcctgtcgttcaggaggccgaaaaatatatcggtgtcccatatgtgtttggcggaagcacgccgtcagagggctttgattgctcggggcttgtgcaatatgtgtttcaacaggcactcggcatttatctgccgcgatcagccgaacagcagtgggcagtgggcgagaaggtagcccctcagaacataaagcctggtgatgtcgtctatttcagcaatacgtataaaacgggaatttcacatgcaggcatttatgcgggcgcaggcaggttcattcaggcaagccggtcagaaaaagtaaccatttcctatttgtcagaggattactggaaatcgaagatgacgggtattcgccgatttgacaacctgacaatcccgaaagaaaatccgattgtttccgaagcgacgctttatgtcggagaagtgccttacaaacagggcggagtaacacctgagacgggatttgatacagctggatttgtccaatatgtataccagaaagcagccggtatttccctgcctcgatacgcaacaagccagtacaatgccggaactaagattgagaaggcggacctgaagccgggagacattgtgttctttcaatcaacaagcttaaatccctccatctatatcggaaacggacaagttgttcatgtcacattatcaaacggcgtgaccattaccaatatgaacacgagcacatattggaaggataaatacgcaggaagtatacgggtgcaataaaagaaaaagactccaatctctggagtcttttctttatgcatattgccccgaaagaagctggtctataaagtaggccacaccattttcgtcattgctttttgtgacaaaggtgcttttttcttttaattcatcaatcgcattttccatggcgatacggtgtccggcgacttcaaacatggacaaatcgtttggactatcgccgatcgcatagatatcctgtgtttcaattccgtatatgtcagccagctttgttaacgcgcgtccttttcctgacgaggccggcaggatttcgataatatgttttcctgaagaggtttgcgccagttttttatgatgcttcagttcttccttcgcttgtttcagcttgtccatatcaaaggagaagcaaagaagcttataaatgttttcaccgccgtcaaaaaccgattcgatatgagggattggtttaatgccaaactgtttgaattgagtcatggctccttgccacaagtcatccgtctgctcgtttgggtttgcgctctttagaatgtcaagctccgcgtgcagcttagcttcgccgtcaaaaggagaaagcagatggtcatctgtatatacctcaaagtaaatgttttttgaaagtaagtaatcagcaatcgctttaccggcttcctgatccattaatgtccggctgatcaaacggtaacccgtgtcgtggatcgtaccgccattagctgcaatgatagggatgtccaagtcatccagcagcgcttttacatcaaatgtcgctcttcccgtgcaaatggtgacgaggatgccggcatcaacggcccgcttgatcgcctctctgttttccgcagaaatgacgctttctttattcagtaatgttccgtctagatcaatcgcaatacatttcatatgtaggggaacctccttaaaaatgaagctgcttcgtgtagtatgttcagcttgcctgtgaaacataatccatataaattaaggctaaacgttactttgataattttcaacaaggaaatatgtaaaacgggatggcgtaatcgccatcccgttcattatacacctaaatcgttttgcagctcttttttaacttcctgcagcttttgctgattcaatttgaaataatagactccggcaggttcataatcataacccgtcagctgaatagactcaactgatttcaatgaagtgatgaacgggaacaggccgatggcatctttaagagataagttcatttttaaattttgccccatcgtatccacaatatcatcataagccggaattgagctcaatgattttgatttatctataatggcgctcagcacttccatttgtctttgcccgcgtaaaaggtcactgtccgctttacgtgttcttacgtaagcgagcgcttcttccccatcaagcgtatgtgttcctttttgaagaacgactttaccttttgtatcttttttgatttgctgaatgactttatcgctttttacagttactttgacgccatttaactcgtttacgacgtcttcaaaagccgtgaaattgctttctacgacataatcgactggaatatccagcatttcttcaactgttttcacagttaagtcaacgccgccgtaagcgtgagcatgtgtgaatttatcatacccgtggcctgggatgtttacataggcgtcacgcggaatgctcagcattttagctgttttttctttccgattaaatgtaaccagcacattcgcgtcacttcttgcctgatcgacggtctcgccgtttttctccctggcatcaattcctaagagcaatacagaaaaagaatcttttccaggatcaaattctttgatccgttttacagattgttctccgcgtgcaaggctgacatgagcttccttagaagcattgttcagctttacaaaagcataggcgccgacagagcctgccgcaatgactaaaaaagccattaatccggcaacaactttcacccatttttttagttttctttttttctttctgcgctgtgatcgttcttccatatatcaatacctcacgtttctttaatatttgaagcgtaccattctatttgccatggggcaactactcgaaagacatttttcgataaatattcctatatttataagttcttgtttttgaaaattgataacgataatgtactgaatcaccttatattggacgccgcagcaggtaaaatgtttcggcgacattgaaaaaaatacaagtaaatgattggaaaacttatgatcagaaaaataaaaaggtttaatggccggaaaaagaggctaaaagatttctaaaaaaatcccacagacaatgtcattgcagctgatggagaaagggagtcatctttatgaaaaagcagtcaaatatatggctttattttttcggagctcttggaggcgcgttatatggctatgataccggagtgatttccggagctattttatttatgaaaaaggagttaggcttaaacgcgtttacagaaggtcttgttgtcagctccttgctggttggggcgatattgggctcaggagcggccggcaagctgactgaccgtttcggaagaaaaaaagcaattatggcagccgcgctgctgttttgtataggcggtcttggtgtggcactggccccaaatacaggagtcatggtgctgtttcgcatcattttgggacttgcagtcggaacatcgacgacaatcgtacccctttatttatctgaactggcgccaaaacataaacgcggggcgctgtcatcactgaatcagctgatgatcacggtcggcatccttctttcttacattgtcaattacatatttgccgatgccgaagcgtggcgctggatgcttggattggctgctgtgccgtcattgctcttgcttattggcattttgtttatgccggagagcccgcgctggctgttcacgaatggcgaagaaagcaaagcgaagaaaattcttgaaaaattgcgtggcacaaaagatattgatcaggaaatacatgatataaaagaagcggaaaagcaggatgaaggcggtctgaaggagctgttcgatccatgggtgcgcccagcgcttattgcaggtttgggactcgcttttttgcagcaatttatcggaacgaatacgatcatctactatgcgccaaagacctttacaaacgtcggattcggaaactccgcttcgattttaggcacggtcggaatcggcacagtcaatgttctcatgacattagtagcgattaaaatcatcgacaagattggaagaaagccgttactgctattcgggaatgcgggcatggtgatcagcttgatcgttctcgctttagtaaatctctttttcgataacactccggctgcctcatggacgaccgtcatttgtttaggcgtgtttatcgttgtctttgcggtcagctggggaccggttgtgtgggtgatgcttcctgaattgttcccgcttcacgtcagaggaatcgggaccggtgtttcgaccttaatgttgcacgttgggacactgattgtttcattaacctatccaatattaatggaagcgatcggaatcagttatttattcctgatttatgccgcgatcggtatcatggcgttcttatttgtccgatttaaagtgacagagacaaagggaagaagccttgaagaaattgagcaggatttacgggacaaaaacggacagggaggagcggccggaaaacagcagactgtcggaacataaaaaagggtgcgcgatcatgcgcacccttttgattgcttactttcccaccgtgccaaagttaatgattttaaaagaaatatcgtacttaaaatcagtctcagaaaatatttcatcccaatgcccttttactttattccagtagtcagggtgttgaatccttatgtggtctgataaaaagaccggatcggttttatactcgtgctgcagtttatccatcacctgctttacatctcgttcaagctttttttcaaaaatgttttccagcctgtgcaaataacttttgctaaaggagttttcattcgggttttggtcttctgtcaggatgcccttcgttttaacagaaatatgaaagacaggctttccgttttcaatgacgggcttaattttcgttttcgactttttaatttcaaacgtaatcggatgtcctttatctgtcgtcggcatgacaccgccttggatcgtccccatgacccatgacagtgtttgggtttcatcagctgaaagaaacccaacgagtttattgctgccccttttgataatgcctgctccgtcatacttggcttttcccttttcgtttttcacggcttgaataagataactgtacccgttctgagagtagacagaagctcttccgatgcgcagcggtatcataatcttaccgttatatccgctgtgagttgtcaaatcaatcagtttttcggagggcatcggctgctgctgattggggtttccttttgtgaaaacatcagctgcattccctctggctgccatcaaatagctgcttcgccgcagctcatcatcccggataaagtggttgaggacttggtctacattttgattcctcatcagtttttctcccagaaggatcacttttaaatgatcgctataaacaggagggtccttgatggatacatcactgactgcttccagaatcgttttcccgtgggacgttacattaacaaattcgggttttccggatgcttggctgtcttcgctttggggaagaagattttgatacgtcagtttgtactggtgatcatttgtctcatcgatcgccagccctctggcgaaggatagttgctcgatatctttgacatcccagcagccgcagagggccagcagcataaaaaacatgacggagaattttgatgctgttttcattgcagctgccccctccctatttttttctgtatccagcttaaaaaccagacgaagaatggaattgtaatcacaattaagaaagcatatccaagaagcgtcccgtaataaaacacgtcattcaagtccttgggatacatcgttatgaaaaacgtcgcagccagcattgcagtcagcagccatgcattgtttttattttttagatgaaagatttccgttaacccgatatgggcgcctttaaaggatccgagcatacaggcaaattgctgggctgtccaggtcagctgtaagaacaaatcaaatcgttcaataaaaatacccggaacctctaatgcgtgaataagggaaatggtcggccatgtcaccgtttttgcctcagccacagtcatacagccaatcacaatgagcaaagtaatgctgtagaacaatgtggaagtcgcgatgcccagagcaacagcctttttcacttgctttggatctctcataaaggggaccaggtaaaaaatgatttcaaatccggagaaatataataatgtttttgggaataaagagaaaaagctttgatagcctccttcaaataccggccggataaaatcaagctggaacaagcgaaagctgaacatcagaagcatcataaaaataataagggttataggaaaaatataagcgtatacttttgcaattgaataaacgcctccgcctacatgatagatggcaactgcaagaaatataaacaccacaactgccattggcgtatttttcaacaaaaagaatccgacaacctctcccaaaatccgagcttgaaagcaaacaatcccaatgaaatatagacagatatataaattcaatagaaagccgatgaattttccagctacaatgctgttgagcttaaaaagagtttttccgctgtttttttgaagaaaaggcaaaaaaagcagaacgatgataataaaaataacgccctggagcagtatcattagccatccgctcggactgccggtttcggcggctgagcggggaagggtcagcaccccggcaccaatcaatgtgctgctgatcataatgagcgtctgcataaatgtcagtttatgctctgatttcctcatagccatcacctttgtctgatgttatcttcgggatcgtttcgtgtcggtcttctttttaaaaacatcgtgggaatacggatgactgtgtctttcaaatcctgtccaggctgcgccatgatcgggataatgtaatcctggccaaagcttttcaggcgcatgagatggccgatcacaaacagataaaccattataacgccgtacatgccaagcgctgttgcacttatcataaccccgatccgaatgatccgcagcggaaagttataggcgtatgaaggaacggtaaaggatgccagtgctgtgacagaaacgacaatgaccataagcgcactgacaatttgcgcctgaacagctgcctgtccgatgacaacgccgccgataaggccaattgtctgtccaatcggcttaggcagccttaatccggcttctcgaatcaattcgatcgtaaagatcatgataaaggcctctacaaaaggcgggaatggtacgttaagcctgctgcctgcaatggaaatggccattctagtcggcaatagcccggtgtgaaaagaaacgagagaaatatacagaccgggcaaataaatggtgatcaggatgctggaataacgaagaaggcgtacaagtgacattgggatccagcgctggctgtaatcatcgggcgaatgaataaattcgtcaaccgtagccggtacaatcaaagcaaacggcgtaccatccactaatatggacactcgcccttctaatagagaactttcgacccggtccggtcgttctgtgcttaatattgtggggaaaattgaaaatggttcgtcttcaatcagctgttcaagcgtccccgattccggcaaattatctatattgactgatttcagccttttaaacacttctttgacgacataatctggggcgatatcctgaatataagcgacagcgattttctttttggtcctttttccgagtgtcatttctttgatgacgagattaggatcactcgtccgttcacgcaaaagcgccgtgtttgtccgcagcttttcaataaatcctattttagggccgcgttccacgacttcggaggagggttcatcaagactgcgtgttgcgactgactttgtgtcgaaagctaatcctccgcgatagccatcagcgagcaaaatggcttgccctgaaaaaacgagctgctctatttctttcattgtagaaacaacgctgtggtgaaagccgaaaaaaaaggcggataagtcttcaatcgagcattccttatgggccaacgcctctttttgtaaaggagaaatgacgtattgcgccagcattttattctctgtcagaccgtcaatatacagtaaacacgccttttgtctgctatctccgaaagcaaatgtataaaacatcatatcgtcgttttgtcccaatgtttttttcagtgtgtctaaattgttctggagatcagagtcgatttgcatagtttctctccttcttaaacatattgacggtttttattaatttgtatcaaaaaaggagaattattcttatcgaggaaaaggctgaaacaaagcttcttttcgacgtgatataatagataggaagcgttttctttgaaggggtaatgaaaagatgatgctttgtacatatgttgtcataggaaaaaggcagcttatacgggcgtttgtaagaggggcgcaccgggaaaatgatgatcagttatttacaggggaggggtacggatcatgacgcaatcaccgatttttctaacgcctgtgtttaaagaaaaaatctggggcggaaccgctttacgagatagatttggatacagtattccttcagaatcaacgggggaatgctgggccatttccgctcatccaaaaggaccgagcactgttgcaaatggcccgtataaaggaaagacattgatcgagctttgggaagagcaccgtgaagtattcggcggcgtagagggggatcggtttccgcttctgacaaagctgctggatgtgaaggaagatacgtcaattaaagttcaccctgatgattactatgccggagaaaacgaagagggagaactcggcaagacggaatgctggtacattatcgactgtaaggaaaacgcagaaatcatttacgggcatacggcccgctcaaaaaccgaacttgtcacaatgatcaacagcggtgactgggagggcctgctgcgaagaatcaaaattaaaccgggtgatttctattatgtgccgagcggaacgctgcacgcattgtgcaagggggcccttgttttagagactcagcaaaattcagatgccacataccgggtgtacgattatgaccgtcttgatagcaacggaagtccgagagagcttcattttgccaaagcggtcaatgccgccacggttccccatgtggacgggtatatagatgaatcgacagaatcaagaaaaggaataaccattaaaacatttgtccaaggggaatatttttcggtttataaatgggacatcaatggcgaagctgaaatggctcaggatgaatcctttctgatttgcagcgtgatagaaggaagcggtttgctcaagtatgaggacaaaacatgtccgctcaaaaaaggtgatcactttattttgccggctcaaatgcccgattttacgataaaaggaacttgtacccttatcgtgtctcatatttaaacttaatctcacttcgaggttaagtttttttattagaaaatggaagtgattcacctataaatgaagcatgcgcgtgccgataaataaactagttttatatactcatagaataagaaagaggagaaggaatgaaaaagagactaatcgcacctatgcttctatccgccgcgtcccttgccttttttgccatgtctggttctgcccaggcagccgcgtataccgactactcactatataaagtagagccgtcgaatacgttcagtacagaaagccaagcctcacaagctgtcgccaaactggaaaaagatactggctgggatgcatcctatcaggcttcaggcacaacaacgacctaccaaatttccgcctcaggcattcatagcgaatcagaagcgaaagcaatactgagcggactcgccaaacagacatcaattacaggaacgtcaagtcctgttggaagcaaacagccatatgtcaccatctcgtcaggtgccatctccggagaaaaacaggccaacactatcctagcaaagctgaaacaggagacgggagtggctggcgctgtaaaagcttacggagcagctcagccctatatgaacgtcatgacatcagacattgctgatgagacaaaagtcaaggcgcttatccagagcctggccaagcaaacggggattaaaagctcgtatcagcccatcacacacacggtgtctgtcacaaccattcagtctggcacaatcgtgggagacagcagagcagcgcagatcaaaaacgccttccaaaaggaatctgggctgcaggcatcattaaaggaaacagtgaaagggcaagcctattatacgttcacaactgccgccatttcaggtgaagccaatgccaaaactctattgcagcagctgaaacagagcactggcatcacaggcagctacaagtccatcaatcaaaaaacaaccgttgagtcatacaatgtccaatcagcttatttcaaagggctgagtacagtaaaggacgccatcagccaaatcaagaaaaacactggcgtatccggcagttatcaacaggttggaaaaagcacatcatataccgtgaatatgaagggtataacaaaacagcagctccaaaaaatagacactttctttaaaaagaaaaaatggcattacacgtcatccagcgtcaaaaaaacgacaacgtctgcagcttatcaaatcacgacggcaaagattttaggcgagcagcaagcaaacaaagcagcagccttctttgctcagaaaaaagtaaaagctgcaaaaacagcagctggatcaacagcagaaaatcaatatcagctcatctcagaagaaacatcagatcaagcaaaagtcacaaagggtttgaacatattaaagaaaaatcagctaagtgcttctgcgaaatccgtcaaaaaacaaatagctgacacgtttaaaatcacaaccgaatctctgcttgatcaaacgaaagtcaatcaggcactcacgtttttcaaatcgaatcatatatcagtagcaagccagaaaaccggtcagacagctgcgagcagctatcaaatcacaactgaagctatcatcagccaagaagagattgaccgcgttttaacatttttcaaacaaaatcatatcgcagtcacaacatcaaaaacaggccagactgcatatacacaatacaaaatcgtgacaacacagcttagcagcaaaaccgcattgaacaatgggttaacctatcttaaatcgaaaagtgtaaccccgagctatacaacgaaaagcaatacgctttataaaatcagcgtaaatgagcagttcacaggcaatgatacagctgctgcggcatcaacgaagctaaaacaattatacggatggacatcatctatcgtgaagatcaaaaacggcccgcaaatcatgaaaacaaactacaatctctcgcttcgtgatatggtccaaaaacaaatgacagtaagtccgcaaacagacggagcggcttacgtatcgctcacgtacattaatacagcaacatcaactgttacggctgatgtactaaatatccggtcaacgccggaagtcagcccgacaaacgtgatcggccagtttaaaaaaggcgataaagtgaaagtcatcggacagataaacggctgggctaagatcaatttgggctggcgaaacgcaagcagtgatgaagtagttcaatacgtggatccgaataacttttccagagacagcaaatactacttccaatttctcaagctgtcacagacagcgggtctcagcgttactgaggtaaatcagaaagtgcttgcgggtaaaggcatcctgacagggagagcaaaggcatttatcgatgccgccaatcaatatagcatcaacgaactgtatttaatctcacacgctcttctggaaacaggaaacgggacatccgctttagccaatggattaacctataacggaaaaaccgtatacaacatgtatggaattggagcatacgacagcaatccgaattactacggagccaaatatgcgtacgagcagggctggttcacaccagaagcggccattatcggcggagctaaattcataggctcatcgtatatccacaacacagcttacaatcaagacacactgtacaaaatgagatggtcagctacagcgacacatcaatacgcaacagacatcggctgggcgtacaaacaagtaaaccgcatgtacagcctgtattcattgctggacggttatacactttattttgatgttccggaatatcgataaaaaacttagaaagttgcaaataggctgtagctattaaatagctacagcctatttgattatcacacctcaatcttgtccgcaacaatcataaaaatactcattcttgaagcatttgagatggctgcatcatcgggtctgatttttgtactccctttcataaaacctatttcaagcacatttgatttttctccgccggcaaaataccaggatcccattcggatatccttttgttttaagcggaaatctccttctatcgattgatgcagtaaactaatatagcgttcatttaatgtgacttgcaagtttccatctgcattgatagtaatatttcggactaaatttgatgtgtaagatggtaaataacctgaagtcggaaccatccattttttgttttgagcattatactctaaaatgaaggtttgaataaatggttgaaatctttctggaggtgtatcttggtgccccacggtttttaataaaggggatcgaagcataggtacatgattcatgaagttttcataagaatggtatgcataaattctgcttatacgatttccttcttttccacttgtaattcccaccattaatgattttgccccagtttcaggattggtgtacatacagatcccttccggttcacggaagttattctcatatctggtggacaagtctttgccaacagtaatttctttttgcagcactattttattatcggaatcaaatacagttatgagattcggatagcttttgctgtttgtatctcctgtataccaatataaataaccgtcatctaaaaagaaaccttgtaaataatgaagttcgtcaggaatgttaatagtataaagaggattgtttttatttgctattgcatcgtccaggttaaagattgtcacccactgtttattattattattttttgtatcgtattgtctaattgccaactgtctattcttcatatcaagagcaggtgtaaccctatgatcgaaaggcatattcgagaatcgctgaagttctttagaattttcatctaaagtcgcgcctgctttatatgggaaacaaactaattcacttttatctgtttcgtttggtttatcgtatagagaccaaatataaatggtgccattacggttttcaattccaatatttgtaccatgacctccatgtttcaacagcatgctgtctaattgtaaaccttcaagagatagacgagttatgcgatagctttgggtgttgtcttttcctaatccacttgcgacttgggttgtataaatttggtggtttttctcatcgaaattgaatgattgaagtacggttttgtctgctacacgtagttcagtaaataattttggcgtgatgttggtgaaatcaaacagttctttttttctcataaatttaccacctctattattatttgctgccataagcaactaattacattaaagcaaacatacgttcggtattcaatagaaaaaagaacacttgttctgttttgaacaagtgtcatcatttagcttattaaattttcgatgaaattcaataaattttggcttgaattcccatcagaatacttattccatctatcggaaaaaacttttattttggaataattaaatggggtttgaatttcatttattaatgattcactgtcatagcaggctcttccaggtattatggaaagataattatcaaccaatccccgcttctgttgataaagttttaaatcgtaagtataaaaaagaatgggtttatttaaaatcgaaaattcaaagggaacagaagaatagtcagtgattaatatgtctgcagccatgagtagatcaaacaaggcatagttagaaacatctttaatataatcactggaatatttaatatcaatattgttctgaatggcgggatgcagcttaacaaataaaacatattcttcttttaactgatgaattaattgttcttctgtaaaaggcaattgaattgattgcatattataatctctaaacgtcggtgcatagaggattattttttttctttgtatgtttagagtatctgaaatttttttcttgttttctcggtaataagggtctgttaaaggtacacctatttttaataattggttatcctttattccaaatgatttcttgaagatatttgccatctcttctgagccaacagttaaataatcatacgaactgtatactttttggaaccttttaatatcagttttcgtccgttgcatgtttgtaatgtcttccaaaccaaattttttgagtgagccatttgcgtgccatacttggatacatttcgtttgcttccgcttatttaacacacttgttaatagaaagtaattatctgttatgatcactttactgttaaacattaggtatacagctttaatgagatggatagggtttttttcttgtaataaatatgcatctacattcgggaagctctcggcaatagcagaggcctgctgggtatacaggatgttaagtttataagagtattgtccttgttcatattcctcaagaatcgcttttgcgtttgcttcgaatgagatcaggagggtcactttgctttcaggtttcacccattgcagaaaaaaggcgattgctgataaaaaatacaaatagcaattcgccagtagtgatcttattttcatttttatcatccatttatttgaaagttttgtttttaaatctgttttgtatgatctttttcaggctttggatagaaagtttttttgtttttttcttcttttaaaaccgttaaagcatattttgggatgctaagcattcttttccatcgccatggattcaagattaaccggtagaaccattctaaatttaaacgtatcatccaggaaggggcccgtttgacattaccgctaaatacatcaaagcttcctcctagacctatagatacggctttagggaacaagtgtctgtagttatgaatgaatttctcttgatgaggataccctaaagctacgaataccatgtcaggatttgctcttgcaatttgttttgccactagggtgcgatcttgaacataaccgtctgaataacctgcgattttaatgtttgggtattcagaagaaattttggatacaacaccttttataacatctttcttcgcaccgtacagaaatatgcgttttttctttttgttagcaacgcccagaagttctttaaaaacatcgtaacctgcgattcgggactgaagcctgttgttagtcaaacgtgacatcatgactacaccgatcccatcaggcaaaatgaagtttgaagaagatagtacatcaaagtagtcccgatctttaatagctgcaaatgcaatttcagggttgactgtggaaatgacagcaccaatcttttgatcaatataatgtttctctaggtaatcgataaatgatgttaagttactgttaacataaggaatattgtgaatagtctctgtttgcatgtctggctcctccttcctttaagattctatttatatagttaaaaaccgagagtttctaaaagcaaaatcaagctaccttatattttaacataaatcttcaacaaaggattaacattatctttacattaaatttaaatatgtttccaattttacaattgaatgaacgaatgaacaacagaccttggtgccaatggagtctgagtgtaattacatattttggaatgtttttctcctcatgagtacttaaccttttttaggcggtatgctataattaatgatcagtgaagacatacgagaaatatgtcgatataaggaatacaaacaggtttttagaatttaatcgctaacgtcagtagtgtttttaatagtgtttaacattaggaaggagcgtttctttaaatgaaaaaagttatcacatatggaacttttgatttactgcattggggtcacattaaattgcttgagcgtgcaaagcagcttggtgattatttagttgttgctatttcaacggatgaattcaatttacaaaagcaaaaaaaagcttatcacagctatgagcaccgtaaattaattttagaaaccattcgatatgtggacgaagtaattcctgaaaagaattgggagcaaaaaaagcaagatattattgatcataatattgatgtttttgttatgggggatgactgggaaggtaaatttgactttctcaaagatcagtgtgaggttgtttacctcccaagaacagaaggcatctctacaacaaagatcaaagaggaaattgctggtttataatttaggatcctgatatcattggttcaatatctaattaaagtacttcttattgaaataagaagtactttttgatgcttacattgatttttgtgactaaagtatccgggtagatataaatttcaatgatcatatattctagatgccgaaagggagtaaaaaattgtctttacatgcggtgagtgaatctaatataaaacaaattcctgacatggattattattttatctctggtggactgccaagtaattatggcggtctgacgaaatcattattattgcgttcaaaattatttggagaagagtgtaaccaaaacacctttttcttaacgtttcgttttgatttagagttgtcttcaaaaattgatgaattgtacagcaacggtaagattgataaaaaattcacaagtgttattaatctattcgatgattttttaagtgttagaacaaatgggaaaagatcatacgaagaaaggataggccttgaccagataaaaaagcaagttggaatggggaaatttgcaaaaactctgttgagattgtttggtaagaagaacaatgaaatgtctgtagtttactacggagatggagaaactatccggtacgtcgactattggaatgataaaaaccagctcataaagagagaggaatatacgaagaacggaaacttagttctcgttactcattatgatgtgcagctaaacaagatgtatctgcaggaatatattaatgaccaaaatcaagtatatttagacaaactctatgtatggaacaatgaagaaaaagatgttcaattatctcatattatttggtactcccttgagggtgagataaaagtaaaagatgaatcggaactgcgtcaatattggatagaatatctgcaaaaacaaaatgataaacctaagttgtttttagtggacagcagaccgcaagacaaacatgtctttaaagtgaaaaaatcaccttcttcctattatggagcaattattcataacaagcattacggcagcaataaatatcaaattaagggtcgctataaagaagtatttagtcagatgtataatttggatgctgtcttttttataactgaggagcagctagaagattttaaattgatttcaggggaacaagagacgtttttctttactccgcatacaattgataagcctcttgatcccgctgtattgaatgtgccgagtgaaaaatacaaagctgtcattatttcaagacttgcatctatgaaaaatctgatacatgcagtaaaagcatttagtttagtcgtgaaagaaattcctgaagcaaaacttgatatattcggatcgggtgaagatttcgaaaaaataaaaaaagaaattgaagataccaaactgcagaacaatgtctttttgaaaggctatacggataaccctgactcagagtttcaaaaagcttggctaaccatttcaacctctcattttgaagggttcggtctatcaaatatggaggcactgagcaatggatgtccagttgtaacatacgattatgattacggagcaaggagcttagttactgacggagcaaatggatatgtcattgaacagtataatatagagaaattgggtcaagctattatctctttgatgaaagatgaaagtactcatcaaaaattttcagaacaagcttttaaaatggctgaaaaatattcaagacccaactatattgaaaattgggcttttgctcttaatcagatgattgaggtgcgaatagaaagagagaagttctctaaaaaggttggaaaaaaagatccttctattagttcctatactgaggattttgataaaactaaaatagaaattgacattgagaattttgatcataatgatattaaaaaaatacgtttagtgggcttggacagaaagaataaggctgaaattatttcaacaaacttacaaaatgatcaactgtttgtaattgatctcgaaaaagatgtaaatattgaaaagatagctgctaataaaacccaagttattgatttttatattgttttcaatgcaaatggccatattaaaacaatgcgaagactttcgagtgaagaaacaaaattgtcaggaaacagtatagatactaataatggctatagagtagagccctatacaacagttaaaggcaatttctcttggagggtcacggaaataaaagagagttaatgtccttagtagttgacactaataaaaggaagcaaaaaggaaagagcttttatacagaggagcagaaaaaagtaatgattgaaaacactgtgattaaatgtattttgaaaagcttgaaaaacaatttaggaagtcttgaattgttaatctcaattgattcagaacaccaatttttagaggattaccagttatttttaaagctgaaagagagacgttcaggaacggaatctgaatttccgcttcaaaacactggctcattagagtataaaactgagataaatgctcatgttttgcctatgcctgttgaaatgggacaaacatatgatttttatgtcgaatttcgaaaaaaatatgaagatgcggagcaggaaccactcttgaagcgtctttctgctgaagtaaattcaattgagcgcgcctttcatgtcgatcaaaccacagaacttttgattttaccttatacaactgataaaggcaacttttctattaaggtgaaaagagaggccaaaatcatcagatttgatcaaatcgagattagctctgaagaaataagcataacaggttatgcggggtacctgagttccgaaaatcaatatcggataaaaaacttgaaccttattttaaaaaagggtggagaaacacctattgaggaaaaatttccaatcaagctagaaagaaaaacacatggcctggaaaacatgagagcagatggttttgttccggaactgtatgattttgaagtgaaagtgcctttgaaagaaattcctttctcaaatgaaaaacgttatgtttatcgtctttttatggagtatatatgcaatgacgatgaaggaacggatattcagttcaacagcactgctcttgttttaggagatcgaaaaaacaaattaaaaggattagtaagtattattaaaacaaacaacgcaccagttcgttatgaagtctttaagaaaaagaaaaagcagactctaggtatcagagtaaacgactatagcctgaaaacaaggatgaaatactttattaaaggaaagaagaagagattagtatcaaaaataaaaaagatcacaaaaatgagaaacaagttaatcactaaaacatacaaatctctattcatgatggctagcagaatgccagttaaaaggaaaacagtcatttttgaaagttttaatgggaaacaatacagttgtaatccgagagcgatttacgaatatatgcgggaaaaccaccctgagtataaaatgtattggagtgtaaataaacaatattcagcgccttttgatgaaaagggaattccttacattaatcgcctctcattaaaatggctcttcgctatggcaagagctgagtattgggttgttaacagccggcttccattatggattccgaaacctagtcatacaacatatttacaaacatggcatggcacacctttaaaaagacttgcaatggatatggaagaagtccatatgcctggtacaaacaccaaaaaatataaaaggaattttatcaaggaagcttctaattgggattacttgatttccccaaatggttattcaactgagatctttacacgggcgtttcagtttaacaagacaatgattgaatctggatatcctagaaatgattttcttcataatgataataatgaggaaacaatatcattgataaagagtaggttaaatattcctcgtgataaaaaggttattttatatgcccctacatggagagatgatcagttctatgcaaaagggcgttataagttcgatctcgatttagatttgcatcaacttagacaagaacttggaaatgaatatattgtaatcttaagaatgcattatctggtagctgagaattttgatttaggtccttttgaaggatttgcatatgatttttctgcttatgaggatattcgagaattgtatatggtttctgatttgctgattactgattattcttcagtattctttgattttgcaaatttaaaacggccaatgctattctttgtccctgacatcgaaacctaccgggacaagttgcgtggtttctactttgattttgaaaaagaagctcctggtcctttggtaaaaactactgaagaaacgattgaggctatcaagcagatctcatcgcctgattataagcttccggtttcttttggtcctttctatgataagttttgctatttagagtcaggacgttcatctgaaaaggttgttaatactgtatttaaagctgaataatttaggttattttataaaatgtatagctgtcgatttttcggcagctttttagatacttgttgagaagtgaaaaaaaatgcaggatctgttacaataatcagcggtgctttcaaattttaaacagaaagattcccaaaaacaattaagtctaaggaagataaaaaatgaatgatttgttgcgtatactcagagagcaaataacgtcatttcctttaattttaagattggcggcttatgaaaccaagtctaaatatcaaatgaattatttaggtgtcttatggcagttcttaaatccgcttatccaaatgctggcctactggttcgtatttggtatggggattagaaagggcggtcctgtgacaaccggagcgggcgaagtgccttttattatttggatgctggcaggattaatcccatggtttttcatcagtccaactatacttgatggatcaaatagtgtatttaagcgcattaatatggtggctaaaatgaacttcccgattagttctctaccgtccgtggcaattgcatctaacttatttagttatatgatcatgatggtgatttatatcattgtactcctagttaatggtgtgttcccgagtgtgcattggttacaatatatttattacttcatctgtatgattgcttttatgttttcgtttagtttgtttaactcaacgatcagtgtgctgattagagattatcaatttttgctgcaggccgtaacaagacttttgtttttcttgttgccaattttttgggatgttaatgcgaaactcggtcaaagccaccccgaattagtgcctgttctgaagttgaatccactattctatattattgaaggattccggaacagcttcttagatggagcatggtttttccatgacatgaagtacacgctgtacttttggttgttcacattccttttattgttagtaggttctatcctgcatatgaaattcagagacaagtttgttgactttctttaatacgtaaggagattttacgatgaaactaaaagtttcgtttcgaaatgtttcaaagcagtatcatttgtataaaaaacaatcggacaagattaaaggattgttttttccggctaaggataatggtttttttgctgtgcggaatgtctcctttgacgtgtatgaaggggagacaatcggctttgtaggaataaacgggtcaggaaaatcgaccatgtctaacctgctggctaaaattattccgccgaccagcggtgaaattgaaatgaacggccagccgtcgctgattgcgattgctgccggtttgaataaccaattaacgggccgggacaatgtccggctcaagtgtttgatgatggggttaaccaataaagaaattgatgatatgtatgacagcatcgttgaatttgccgagattggcgattttattaatcagccggttaaaaactattccagcgggatgaagtcgcgtctcggtttcgcgatctccgtgcatattgatcctgacattttaattattgacgaagctctttctgtgggggaccaaacgttttatcagaagtgtgtagacagaataaatgagtttaaaaagcaaggaaaaacgattttctttgtcagccactcaatcggtcagattgaaaagatgtgtgaccgtgttgcttggatgcactatggcgagcttcgtatgtttgatgaaacaaaaacggttgtgaaagagtacaaagcgtttattgactggtttaataagctatcgaaaaaagaaaaagagacatataaaaaagagcagacagaagagaggaagaaagaagatcctgaagcgtttgcccgtttccgcaaaaagaagaaaaagccgaaatcactggccaatgccattcaaattgctattttgtctattctgactgtcttcatggcgggaacgatgttctttaatgccccgcttcgtacaattgcttcgtttggcgctattccgcaaaatgaagtgaagaaccatcatggcgatgcaaagggcaagtcagaggaacgcttaactgcaatcaataagcaagggtttatagcaaatgaaaaagcggctgcttataaggatcagggtttgaaacagaaggctgacgttacactgccattcggtacaaaagtaacggtagctgcaaaaggcaaacaagcagcgaaaataaagtttgacgggcactcttattatgtgaaacagagcgctgttgcaactaacatgaaacacgctgaattgcatgccactgcatttacgtcttatgtctcgcaaaacgcagcatcttcctatgaatactttctgaaattcctaggagacagcagcaccagcattcaatcgaaattgaatggttatactgaaggaaataaggctgacggcagaaaaacgctgaattttgattatgaaaaaatcagttatgtactggagaatgataaagcaacagagcttatttttcataacatttctcctatcaacccggcgtcactatccttaagtgatagcgatgtattgtatgacagcagcaagaagcgttttcttgtgaatacagatgatcaggtttttgcagttgataatgaagagcatacactgactttgatgttgaaataaaaaaaggctattggatgaatgtccaatagcctttttgtttagatttcttctttgtttagtaaaccttccataaatggaacgagctgatcgcgaagctctttatcctgcatcgcaaattcaagagttgttgtgatgaagccgagcttttcaccaacatcataacgcttgccttcaaaatcgtaagcaaacactctttgaatttcattcagtttttgaatggcgtctgtaagctgaatttctccgccggcgccaacctgctgctcctctaaatacatgaaaatctcaggcgtgaatacgtaacggcctaagatggcaagattagaaggtgctgtgtctttaggcggtttttcaatgaagtttttcacctgataacggcggccttcacttgtcagcggggcgatgatgccataacagtgtgtttcatcttcaggcacttgctgaacaccgataatagaagaaagtgttctttcatattcatccgttaattggcgcaaccctggtgtgtcagcctgaacaatatcgtctccaagcagaaacgcaaacggctcatcgccgataaagttaggcgcgaaccagacagcatgtccaagacctttaggttctttttggaggatatagtgaaagaaacttatcacttttttcagaagtgttcagtttttcctttatctaattgattttcgtttatatcatatcaaccctccttttcatctatatatctccatatgtaattcgtagtttagataaagtcccttagcctgataaagacttcactaaattttaccacgaaaatttttaggaactacgtattacaattccttcacgttttgacgatgaagtaatatgaggagggcgtacaaaataaatgacgcagcagaaagaaaatcattacacttgaaaacgcgacaaaaagaattgactcttccggaatagaaaacttgttgtaatgagtatagataagatatcagatctgtaaaaaatacacatcaatgcaacgatattgtcaaaaagtgctgatgatttacatttttaaagagccttaacttttataggaacatatgctattattgtttattattaatggaacgtaaaaaatatgtcgaaatgataaacaatcagttaaggatttttgttttttctaagttggaaaaggttggaaggtgatgttatctaatgaagaaagtgatacgtacggaatgtttgatttatttcactatggacatatgaagctactggaaagagcaaaagaacctgggattacttaatcgtacgattgtctacaaaggaatactatgaggccatttaccttacaagaatagcaggcatttcaactacccaaatcagaaaagatatggctagtttatagaagcactaactaaaagaggcttgaagtaaattcagttgcttctttttttcttgtttgcgtaaatattaatcttcactctttaaggagttcactgatgaaatttttattataaccaattgcagaagtttactagttagagtttattcagttttgtttaaaatttttgtccttctgccaagaaacaataaattaattttatttgaaagctattctggaaacagtttagctacaatcccctaccaattctacattatcaaataaggaattaaagaaaaataattttatatgcaccaactttgcgggataatgaattttaagaaagctggccagtataaatttaactttaatttgattagaggaaatgaagagggaaccttggagactctatggttattcttgtaagaatggtattatccagtttcagaacaatttaattagggaaatataaatattttgtgaacgatgtttctttaaataaagatattcgagatttatatttaattagtgatttattgattatggattattcttctgtcttttttgataatatgaatttttaaaaaaaccttgtattttttgtgtatgatctcccggcttatagagactgtatcagaggtttttactttaattttcagcaaaaaacgccaggaaacttgcttcaaacaagtgaagaacttatagatacggtaaaagagttgttacataatccttatatagatcataactatgaggatttttataataaattttgtaatttagaagaggcaaggcttctaaaagagtaattgaaacgatcctttaacttctaaataaagaggtacaaacatgttttctataattataccaatatataattctgaaaattatttaagatattcaatagagagtgtccttaaccagtcaattggatttaaggaaaatatagaactgatattaatagatgatggtagtgttgacagcagtcctcaaatttgtgaatcctttaaaaatctatatcctaataatattaaaatcatgaaaattgaaaactctggaccttctgctgcaagaaattgtggattatcaaatgtaagcgaaagatctaaatttattggttttcttgattctgacgatgcattctctcaaaatgcgctgcaaagtgtttatgattttttttgtgattccgaacatgtaaatattgcggtattacctgtttattacacaggtgaaaaagaagggggacataaattaaataatagatttgaaaaaggaacaagagttataaatattctcaacgattataaagctattcatttttatattggcggcactttttacagaagacatacactaactagtaccgtcctttttgatgaatctataaagttttgggaagacgctatcttttttaaccagttattactgaaagaaaaaagatacggagcagttgcagaaggaaagtatttttatagaaaacggaaagaacaggattctttagttgatcgttcatggtttaacaaaaaaaggtacacatatttgttgaatgaatgttacatgactttgttgatggattcattcaacaaatatgatatagttttgccttatttgcaatttttaattgtatatcatataaaactgtttttatatccgaactatagagatgtttataagtctgttttagatcaacaagaacaaagagtttttgttgatgattttattaaagttttaaaatttattgacccgcaatttataaaagaacaagatatgccgatgtactataaagaatttatgtttcacttattaaaagaaaatacagaagctcttgaaaatataaaaaaagaaagagtactgcatagttcatgtactgttacttcggcaaaaataaaagggcttagacttgaattaacagggcactttattaaccagtattatgagatgaaagaaaatgacagaatatatataaaatattttaaaagattaaaaaaatgcaaacgaaaagaactgaaaaaaacaattgaagtatggggatataaattaagagattttagatatgctggttttgttgtcgaaataccgatttgggcctttgcatttgactttgtactaaaaacaccaaatgattctttagaacttaaccatgtgaacatttttaaaagtttgcttacaagggtttttaaaaaaaggtaaggaatgcttttcatacattttactaaattaaaattgttttgcaaaaattagtactctcttgtttcttaattttatttacccgaattcttattcatataaacattatgttaggagtaatcttttatgaacgaaaaaagttttaactatgatttcagtgttataatgccgatttataatgttgagttgtatctcactgaagctatagaaagtatcattaaccaaactattggttttgagaatattcagttaatactggtgaatgatgatagccccgataaaagtgaaatcatttgtaaagaatatgctcagaaatatcccaataacattgtctatgcaaagaaacagaatggcggagtgagcagtgctcgaaattatggtttaaagtatgctgaaggtagatatattcaatttttggatccggatgatttagtttcagaaggaacattcgaaaatgttttaaacttctttgacgaacataagaatgaaattgatattgtagcaatccctattttttttgcagaaggaagaactggagaacataatctaaataataagttttcttctacaagaattttggatgtagaaaaagaaccgcatcatatattaactcattgttgttctacatttataaaaaaagatgccttgaaaaatatcaggtttgatgaaaattgtaaaataggtgaagatgccaaactagttaatttaatcatatcgcaaaagaaaaagtatggtctggttaaagaggcaaaataccattatagagttagagaagatggatcatctgccatgcagactgctaaagcaaataagaattggtttaaccattcacttatcactttctcaaagaatttaatcgatattataaaaaatcatgaacagaaaatacctttatttcttcaatatatggttatgcatgatttgaagtggaaattattgattaaggatatcagtgaaacacctttagacgaaaatgaatacagtgaatttttaacattgattcgagaagtattgtcgtatattgacgacgatgtcatcattgaaacaaaaagtgtcagccatttctatttatatcatgctttaaaaataaagcacggtgaaaattatagtaggtatgtatatgaaagagaaactgaacaggattattatttatacagagaaggtaaaattgtttcgaaattatcggatcaaactttaactattgaaattttagaagaaaatgaggattccattcacatagaaggcttttggagctcgctgtttaattctaaaggttttaagttttatgctaaaattggcgaaacaaaaataaaagcaaagaatataaaaagacagcataatgattatataagtttaggagaagtaataaaaaaatatcccggtttttcaatagatattcccaaaggtcatctagcagataatcatcatattgagttttttataactaagggtaaaaaaaggaagttgacaaaacttcgttttttcaagtattcaggtttgtcaaacgatttatataatacttatgtggctaaaaaagattatattttttattataattataaaaaattaatgttcaaaaaaaacaattttaaaaatagatttataaaagagtttcgtttcttaaaatccctacataaatcaggggaaaaatcaaaaaaacgaaaatcagcgattaagaaggcactgatggcaagaatggtacaccatgttttcactatttttaatagaaaaccagtatggttattcatagacagacaagacaaagctgatgataatgccgagcacctctttaaatatgcaatcaacaagaatgatggggtaaaaaaatactttataataaaaaaagatagcaaggattacgacagaatcaaaaaatatggaaaggtcataccatacagatcttttagacataaaattttaaccttatcctcttccaaagtaatatcgacacatgcagatatatgggttgtaaatccattttttaatatggagatttattttagagatttatttaactttgagtttatctttttacagcacggaataacaatggcagatcattctgaatggttaaacaaatacaacaagaatatcaaattattagtcacttctgccaaacctgaatatcggtctattgtgaaagggaattacaactataaaaaagagaatattttgttgggtggatttccgagatacgataatcttaagaagagtgagggagaaaagcaacttctaataatgccgacttggagaaaagatattgtattaccgaaagatcaggcaaaaggagtaagaccgtacaacccgaaatttaaagatagtgaatatttttctaggtataatgctttgattaatgatgaacggctaatcgaatttgctaagaaaaataattataaaataactttttttcctcacccagatattcagcaacagattgtagactttgaaaagcatgattatgtggagtttgccgactataacagcagctatcaaatgctatttaattcttctaatataatgattactgatttttcatctgttgcgtttgattttgcatatgagaaaaaacctgttatttattatcaatacgaaaagtcataccattttaaacttgattattatgattataaaaaaatggggtttggtgatgtattagaaaatcataatagcttagtggataaagttatctattatatgaaaaacaatagtcgtatggaagataagtatagaaaaagagtagataacttttttgcatatactgataaaaataataggaatcgtatttataatgctattttggaattagataataataaagttgctaaatgaggttggtttgttttatattgacacttcaaatgttgggagaagttctgcgagacttctctttactttttaaaagtgaaaaaaactcaacatttgttacaatattcactggtacttttaaatttctttaaccgaaagatccaaaaaatcaattattttggtgtattatggcaggttttaaatccccttattctaatgatggcgtactggtttgtatttgggatgcgcaacagtaagctggtcataacaggtatcggagaagtgccttttatcgtttgaatgctggctggtttgattccgtggttttctattagcccgacaattcttgataaatccaacagcgtagttaaagggattaatatggtagccaaaatgaactttccgacagttcactgccttctgttgtaattgcttcaaatttatttaattattttgtaatgctggttgtttagtcattgttcttttagcaagtggtgtttacttagcttgcattgaatacaagatatttactatttaatctgcatgtttgtatttatgttttcatttagtttgtttaactctacaatcagtgtgtttgtctgggattattaatttttgcggcaggccgttgatcaggtcttcgcagttgataatgaagagcatacattgactttgatgttgaaataaaaaaaggctattggatgaatgtccaatagcctttttgtttagatttcttctttgtttagtaaaccttccataaatggaacgagctgatcgcgaagctctttatcctgcatcgcaaattcaagagttgttgtgataaagccgagcttttcaccaacatcataacgcttgccttcaaaatcgtaagcaaacactctttgaatttcattcagcttttgaatggcgtctgtgagctgaatttctccgccggcgccaacctgctgctcttctaaatacatgaagatctcaggcgtgaatacgtaacggcctaagatggcaagattagaaggtgctgtgcctttaggcggtttttcaacgaagtttttcacctgataacggcggccttcacttgtcagcgggtcaataatgccgtagcggtgtgtttcttcttcgggcacctgctgaacaccgataatagaagaaagtgttttttcatattcatccattaattggcgcaaccctggagtttcagcctgaacaatatcgtcaccaagcagtaccgcaaacggctcatcgccgataaagttgcgtgcgcaccagacagcatgtccgagacctttaggttctttttggcggatatagtgaatgtcagccaggttagaagcctttttcactttttcaagcagctcagtttttcctttttcttctaggtttctttcaagctcaggagagtaatcaaaatgatcctcaatcgcacgcttgctttttcctgttacgataataatatcttcaataccggcttcaacagcttcttcaattatgtattgaatggtaggtttatcaacgataggaagcatttctttcggcattgctttcgtagccggaagaaaacgtgttcctaagcctgctgctggaattatggctttacgtacttttttcatttaaaaggcaccttccttatgatcgaaaaaatttatggttaaactattctctatttacccttttcaatatgtttttacacatttttatgatatcggataaaccatttttaaacaagctttatccttaatattaaaacttatatcattttatttgaatcaagaatgaaatgatttaaaatgatgcattttcatgtagaatatgtagtatgaatttatttactatagcagaaaaccaggtgacaaatatgaaaaaactaaaagtgatgaccgttttcgggaccaggcctgaagcgatcaagatggcaccgcttgtgcttgaattgaaaaaatatcctgaaatagattcctatgtaacggtaactgcacagcacagacagatgctcgatcaggtgttagatgcgtttcacatcaagcctgacttcgatttgaacattatgaaggagcggcagacactggcagagattacgtctaacgcacttgtaagattggatgagttgtttaaagatatcaaacccgatattgtgcttgtccatggtgatacgacgacgacgtttgccggaagcctagccgctttttaccatcaaattgctgtcggtcatgtggaggcggggctccgtacagggaataagtattccccgtttccggaagagctcaatcgacagatgacaggggcgattgctgatttgcattttgctccgacaggccaggcgaaagacaatttattaaaagaaaacaaaaaggccgactctatttttgtaacgggcaatacagcgattgacgcactcaacacaacggttagggatggttactcacatcctgttctcgatcaggtgggtgaggataaaatgattctcttgaccgctcaccgccgggaaaatttgggtgagccaatggaaaacatgtttaaggccatccgcagaattgtaggggaatttgaagatgtacaagtcgtttaccctgtgcacctgaatcctgttgtccgggaagcggctcataagcattttggtgattctgacagagtgcatctgattgaacctttagaggtgatcgatttccataactttgcagcgaaatcgcattttatattgaccgattcgggcggcgtgcaggaggaagccccatctctcgggaaaccggttcttgttctgcgtgatacgacggaacggcctgaaggagtggaagcgggaacgctgaaacttgcaggtacggatgaggaaaacatttatcagcttgcaaaacagctgttaactgatcctgatgagtacaagaaaatgtcccaggcttctaatccgtatggagatggagaggcttcccgccggattgtggaagaattgctgtttcattacgggtatcgaaaagaacaaccggattcatttacaggcaaataaaaaagaagctttgcacattgtgcgaagcttctttttgttttacttttcgaggctttccttcagctcttttgtaatatcggaaagggcgctttcatcagcttggtagtagtaaattccattgattttcgtgcctgtaccttttagttcgtgctgtttaatatgtttccgcgcacctttgtaatcggactggatatcccacatgttatcgaaggtcaagttcgttttcacattattttcaacaactttaaacatatctccgaatttcgtgatggaagaaatattagcgcctttattaataataccttggatgacttggcgctggcggtcctggcgtccgaagtcgcctctcggatcttcttttctcatccgggtataagcgagcgcttcttttccgttcagcgtgatttctcctttgccgaacgaataaccgtcataactgaacgcgaatgtgctgttaactgtaatgccgccaagtgtatcaacaacgtctctaaagctttccatgttcactttcacaaaataatcaaccggaacatcgaggaagttctcaacagtgtctaccgtcatctgtgtgccgccgaaagcgtatgaatggttgattttatccattgtgccttttccgataatttttgtatacgtgtcacgcggaatgctgaccatgtcggttgtattcgtttttgggttaacggtcatataaatgagcgtatcggcacggcccttatcgccgtcgcgttcatccacacccatgattaagacggaaaaaggatcttttttattgatactgacctctttatccctctttttagatttatcaatgctttcatgaatacttgccacggttgaagctgctttatgccataagtagtatgcatagccgccagttccgagtacaagaagtccgattatcgttaaaattgtcagtaataaagtttttttcttttttctgcgttcgtttctcatcctttgcacctcgtctgttaaattactttcattatgagttaaatttccaataaatacaactctatttaatacaagaatgaaatcctaaaatagtcgttttttataaaaaaaagtttcattgtttcttaatttttctttaaaatataaaataggttgacgataaaatataatgaggtgaaaaaaatgaaaaaatttattgctttactgttctttatattgcttctttcgggttgcggggttaatagtcaaaagagtcaaggtgaagatgtatcgccagacagtaacattgaaacaaaagaaggtacttatgtagggttagctgatactcatacaatagaagtaacagtagataatgagccggttagtcttgatatcactgaagaatcgacaagtgatcttgataagtttaacagtggagataaggtcacgattacatatgaaaaaaatgatgagggtcagcttctgttaaaagatattgaacgtgccaactaagatatagggaggaacctgaaattttgaaatcttgcaaacaattgatagtgtgttcacttgctgcaatcttattattgattccatcagtttcttttgcagcagactcaaacatctcagttaaattgttaaattatattggaaataaatctagcatcagtctatcgccaacaggattttataaagtaactggagataatgttgctgttacggatcgttttgcaggcgcttcacgatacgaaactgcgactcttgcatccaacagccagtggaaaaatcctaatacagtgatattggtgaaccgagatatttttattgatgcattgcctgttattccattggcgaaaaaactgaacgcaccagttttatttactcagcctgacacgttaacaaaaactactgaaagacaaattgctaagtttaaccctgataatattttaatcattgggggagcgcgaagcatttcaaaagacgtagaaaacaagctgaaatcatatggcgctgtgaaaaggataagcggaaaaaatagatatgtcttatcagaaaatattgcaaagcaaatgggcagctatgataaagcgatcgttgtaaccggaagagtatttcaagacgctttagccattgctccatatgcagcagcacacggataccctattttgcttacagagaaagacaagcttccggattatgatttgccaaaacaagtcatcattataggcagttcatttagcgtcagtgatagtgtagaaaaccaaattaaaaaaacttcaactgtgcaaaggattcctggatcaaccagatatgaacttacggcaaatataattaagcaactaaagttgaaggctgataaagtcgtaatgacgaacgggacaaaatatgcagacgtattgataggcgcttcgcttgcctcgaagaaaaacagccaaattttatttgttaaacaagatagcgttccggctgcggctaaaagtataacgaaagataaagccacatatgcatacgactttattggaagtaccagttcaatttctgctgaagttgagaattcacttgctgatgaattttatttagctgacggtggcacctataatctaaaaatcaacagcggaaaattaaaccttgaaaacatcaaaacttacggaaactccctaagaattaaaccagaaaactattctacttcaaacagaattagtcttgatggaaagcagtatcttggcacggttaatttctctattgagtctactaaatatatccgaccggtaaatgagaatattccatttgaggattacttaaaaggagtaattccgaatgaaatgcctgctagctggtcacttgaggctcttaaagcacagactgtcgctgcaagaacctactcaataacaaaaacaggaactactgtacctgatacaaccgcttttcaagtttatggtggctacagttggaattcgaataccaataaagcggtagagcaaacgaaggggaaagttctgaaatataatggatctcttataactgcagcttattcttccagtaatggtggttacacagaagctagtaatgaagtgtggtcgtcaagtgtaccttacttgattgcaaaaaaagatacaaaggatcctcaaataggctggacgcttactttgtcaaaacaacagctagatacgaaatctttggacttaacgaagccttcttcttggtggtcttcagcgactgaaactgattctgcaagactttccggagttaagaactggatcttgaaaaataaagaaacaagcgctgattctgtcaaaattgcaagtattgacgatttaagctttagtggaacgacacaagggcagcgtgcaaaaacagcatcgatgaaagtgaagtattttgttaaaagcagtactggctcctataacttgagcaaaattacaaccattagtgtaccaacaagtgagttaagaacaatgattggagcgactgtatttaaaagtacttatgtgactgtaaaaaaagatacttcaaagtacacaatcagcggtaaaggatatggtcacgggatcggaatgagtcaatatggagcaaaagcaagagcagaagctggagattcatatagttcaattttgaaattttactatccaggtacaactctgacaagttattgattattttaggatataacgccatttaaggaggaaatcaattgcgttcttatataaaagtcctaacaatgtgttttctggggctcatactttttgtgccaacagctttggccgataactcagtgaaaagagttgggggaagcaatagatacggcactgctgtacaaatatcaaagcaaatgtattcaacagcaagtacagctgtaattgttggtgggagttcctatgcagatgctatttcagcagcacctcttgcttaccagaagaatgcgccattgctttacactaattctgataagctttcatatgaaacgaaaacaagattgaaagagatgcagactaaaaatgtaattattgtaggcggaacacctgctgtttcttctaacactgctaaccagattaaaagcttggggataagtattaaacgaattgcaggaagcaaccgttatgatacggctgcacgggtggcaaaagcgatgggtgcgacttcaaaagctgttattttgaacggcttcttatatgcagacgctccggccgtcatcccttatgcagcgaaaaacgggtatccaattctttttacaaataaaacatctataaatagtgcgactacgtctgtgataaaagataagggaatttcgagtaccgttgttgtaggaggcactggaagtatcagcaatacggtatacaacaagttaccttctcctacaagaattagcggttcaaacagatatgagcttgctgcaaatatcgtacaaaaacttaatttatcaacaagcaccgtatatgtaagcaatggattcagctaccctgactctattgcaggagctacactggcagctaagaagaagcaatctcttattcttacaaatggtgaaaatttatctacaggagcccgtaaaattattggaagtaaaaacatgtcaaactttatgattatcggaaacactcctgccgtaagcacaaaggttgctaatcagctaaagaatccagttgtaggtgaaacaatctttattgatccgggtcacggtgatcaagattcaggagcaatcggcaatggactccttgagaaagaagtcaaccttgatatagcgaaaagagtcaatacaaagctaaatgcttcaggtgctcttccagtactgtcaagatctaatgatactttttattctttacaggagagagtaaataaagcagcttctgcacaagcagatttatttctcagtatacatgcaaatgctaatgatagctcatcaccaaatggaagtgagacgtactacgatacaacatatcaagctgcaaatagcaagagactggctgaacaaattcaaccaaagttagcggctaatcttggaacgagagaccggggagtaaaaacagctgctttctatgttattaaatattctaaaatgccgagtgttttagttgaaactgcctttatcactaatgcatcagatgcaagtaaattgaagcaagcggtttataaagataaagctgcacaagctattcatgacggcacagtatcttattacagataatcgaaagagacaaatctaatcacagatttgtctcttttttatatgaaatgattaaaacaaataggacttgtatataaaatagtaaaagagtattaacaacatttatcagaaaaaacacgtaattcacacttcttaacataccatttacatccaattaacatccgtctgctaaactgactggcataggtcatcataacatcccaaacaaatcgtgaggtgtgtgtcagtgagtgcagagaaaagcatgaatgtgagtcgtgaattctcagttcaacaaatacattcttttacattatctgaaaagacggctcgttatttggcaataaagcgcgtaatggatatttggtttgcgctcattggattggcgattgcgctgccaatgattgcggtattttcaattttgatttgtttggagacgccggggcctgccatttatacgcaggaacgcgtagggaaaggcgggaagccatttaagctttataagcttcgttccatgaaaatagatgccgagaagtctggggcggtttgggcacagaagcaagatccgcgggtgacaaggatcggagcttttatcagaagaacgagaattgacgagcttcctcagctgtttaatgtgctgaaaggcgatatgagtatgattggccctcgtccggaacggcccgtatttacggaaaaattccagaatgagattccaggctttacacagcgtctggctgttaaaccgggattgagcggctgggctcaggtgaacggcggttacgatatgacgccgaaggaaaagctgatatttgatttatattacattcgcaatctgactttcactttagaattaaaaattatgttaaaaacttgtaaagtagtttggacgggtgatggtgcaagataaaacgggattccattattcaccatcaatctgagcttaaaaagaagtagggaatatgatgccaagtattacaaaacaaatcatgagcggtgcaaagtggacaagtatttcaaccatgtgtattacaatcatacaaattgttcagtttgccctgcttggaaatatgatgaccttaacagaatttgggcttgtcggcatgatcacaacggttacagttttcgcccagattgtgctcgatatgggttttggcgcagcattaattcagagagacgacgcgacggagcgccagctgtcaacattgtattggcttaacattatgacgggcgttttgctgtttgttcttttatatgtgagcagtcctgtcattgcgggattttatcaaagagaagagctggtgtttctggttcggattctggcgattatgtttttgatcgcgccaattggacagcaatatcagtatatgctgcaaaagcagctgcattttaatacgttaagcaaaatagagattttttcaaatgtattgtcattcggatatttagcgatagcggtttttatgatggatgcgattttggcgtacgtgatttctcaagtcctgctgcagtccagtaaagggattttatattgggctgtataccgaaaaaagtggcatcctgcttttgtttttgatttgagaggcatgaaggatttcttttcttttggagcctttcagctttcatcccgtcttgtgaacaggctgggagcaaatatcgacatgattttgatcggccggtttattggtgctgaagcattggggatttataacctcgcttatcagattgtcaccattccggttttgaagatcaatccgattgtcacacgggtggcattccctattttcgcaaaaaacaaatatgaaaacagcgtgatcagagaaggctttctgaatatgacaaaaatgctggcgcttgtttcgtttccgctgttaatcgggctcgtgtctgtgtcagacgcctttatcacagcggttttcggagaaaaatggcttgctgctgttccgatcctaaatgttcttgcgattgtcggaatactaagagtgctcatgaatccaaatggatctgtgttgctggctaaaggaagagctgacttagcgttttattgggattccggcgtgctgctgctgtacggattatcactgtttgcagctgtacagacgggaagcctgctgacagtcgcatgggtgtatgccattatcagcgttgttaatttcctgattgggcgctggcttttggcatatgtcatcaagcttaacctttcagcttatttccagtcgattatgaagccatttctgattactgcggcgatgggcatcatcgcgtttggtgtaagcctcagtaccgaacacttcagtatgcaggcagaaatgcggctggccatttcagttgcggctggggcgctgtgctatctctttcttttggtaaaagcgtaccctcaaacgaaaagcaaactactaagaaaaggacgtttgtcatgaagattttgtggatcacaagcgtatatccgagcagtatgaaacccggagagggtgtgtttcatgagacacaggtgcaagagctgcaaaaactcgggcttgatatcactgtgatatgcccacggccttttcattcagcacctgtccgcatgctgaaaaagacatatcgaaaaaaggatgtcagaccggagtatgagattagaaaggggataccggtttaccggcctttctatcgggcagttcccggccagctgaagtgggcgcagcctcatcggagaatcgcatcagccgttttaaaaacaatgaaacagcgcgacctatatccggatctgatccatgcgcattttgccatgccatcgggcggggctgcggcagtcgtgtcagagtcagcgcaaattccttatgtcctgaccttgcatggcagtgatgtgaatgtctatccgcattacagcaaaggtgcgtttaaagccttcaagcgtgccgtaggttctgcgtcagttgttttagcagtcagccacaagcttcaggaagaagccaaaaagctttcgggctttgacagctcggttttgccaatcggcatacagctcagccgttttcaggggaatgaggagacgaaagaggaaatcagaaaaagactcggactcccgctcgatcagcgtctggctgtctatgtcggccggctggtcagagagaaaggcatttttgaactgtctgaagcgatcgaatcgctgcaggactctcctaaggcagtctttgtcggggatggtcccgcaaaatcgacgctgacgcagaaggggcatatcgtcacaggccaagtcccgaatcatcaggtaagagactatttacttgcggcagatctattcgtacttccttcttacagtgaggggatgccgactgttgtgattgaggcgctggcgctaagggttcctgttatttgtacggatgttggcggagtgtcgtctttattcggaaagcaccaacatctgctgattaaaccgaaatccgctcaagccttggcggaagcgatcactcggtacgaacatgagcaaatatggaagccggaagtagcagatgacttgtatgaaaccgtgcaggctcaatttgacgcaggaaaaaacgccaaggccttgcatcatcagtatcagacggtcacgaaaacgtccgtttaatcgtaagacactgcgaccattataaattggaagatcattttacaggagagggttgagcgctgtgaaaaaaatagctgtcattggaacaggttatgtaggactcgtatcaggcacttgctttgcggagatcggcaataaagttgtttgctgtgatatcgatgaatcaaaaatcagaagcctgaaaaatggggtaatcccaatctatgaaccagggcttgcagacttagttgaaaaaaatgtgctggatcagcgcctgacctttacgaacgatatcccgtctgccattcgggcctcagatattatttatattgcagtcggaacgcctatgtccaaaacaggtgaagctgatttaacgtacgtcaaagcggcggcgaaaacaatcggtgagcatcttaacggctacaaagtgatcgtaaataaaagcacagtcccggttggaacagggaaactggtgcaatctatcgttcaaaaagcctcaaaggggagatactcatttgatgttgtatctaaccctgaattccttcgggaagggtcagcgattcatgacacgatgaatatggagcgtgccgtgattggttcaacaagtcataaagccgctgccatcattgaggaacttcatcagccattccatgctcctgtcattaaaacaaacctagaaagtgcagaaatgattaaatacgccgcgaatgcatttctggcgacaaagatttcctttatcaacgatatcgcaaacatttgtgagcgagtcggcgcagacgtttcaaaagttgctgatggtgttggtcttgacagccgtatcggcagaaagttccttaaagctggtattggattcggcggttcatgttttccaaaggatacaaccgcgctgcttcaaatcgcaaaatcggcaggctatccattcaagctcatcgaagctgtcattgaaacgaacgaaaagcagcgtgttcatattgtagataaacttttgactgttatgggaagcgtcaaagggagaaccatttcagtcctgggattagccttcaaaccgaatacgaacgatgtgagatccgctccagcgcttgatattatcccaatgctgcagcagctgggcgcccatgtaaaagcatacgatccgattgctattcctgaagcttcagcgatccttggcgaacaggtcgagtattacacagatgtgtatgctgcgatggaagacactgatgcatgcctgattttaacggattggccggaagtgaaagaaatggagcttgtaaaagtgaaaaccctcttaaaacagccagtcatcattgacggcagaaatttattttcacttgaagagatgcaggcagccggatacatttatcactctatcggccgtcccgctgttcggggaacggaaccctctgacaagtattttccgggcttgccgcttgaagaattggctaaagacttgggaagcgtcaatttataaaaagaaaaagtgttacttggttgaagctgccggctgctaggctcggccgccggctcctgaaacatcaggaaaggggttaaacatgtgagtatcaaacgatcagcggtccatacgctagcgttactggccgctgctatatttggagtcgtcctattgctgggagccatccataaagatataggtttcatgcagatggctgctgtgcttgcggtgttggcaattggcctgtttttactgacgcttgcaaccgcatttacaacaaaagaacggctctttatggctgtaatctatattttgatcgcctgcacttttttaaataatgcattttttgccattcatcttggatttttcagtttgttcctttaccggcttctgctcattgcagcgggttgccttcatattttcggcatggttcggaatcgaacccatattgaaagatggcatgggctgcaagtaaaagggattttactctttttcgccttttggtttatatatggccttgtttctctgctgtgggccaagtcggtaacagttggcctcaagtatttagccttattggcaatggggatcttcttcatttatcttattgtcatgtacgtgcaaaaaatggagcggctgatgattgtttatgccatttggctggtgatgacggtatttctgatgatcattggtttttacaatcatatcacccaccatcatcttgcgagttccacattgtacagcggaccggagtacaagcagcattatccgacatcggtcttttttaatcaaaatgactttgcgacctttttatccatcagcttctttttttacatcacgatgatgaaaaacattaagaatggatacatcaaggcaattggccttgtgctctcgctctgtgcgttgtatttaatttttgccactggttcaagagccagccttctgggcatttttgcaggtattgctgtctacatcttcattgtattgccgcctgttttaaagagaatggctatatggctgtcggcggcgggaattgctcttttcgcagttcttttcgccagcaaaatctattcaaagttttgggagctgtttctggccccgcagacgctgcattcatttcatgacaggcttccatcaaatgtggctcgggcaaatctgctgaaaaacgcttggcattttttccttgattcatacggattcggagtcggggcaggaaatgtatcctattatcttgagcattatgctgtatatgatactgacaatgtggcagaggtgcataactggcttgttgaaattcttgctaattttggtttgttcatcatgctgggatatttgtccgtttatgcctacctcatatgggtgctttacaagttttatgaaagaaaattagaaaatcagtcaaaactgatcacagaaggacttattaccgctatggtcagtttcctggtatcaagtatcagcccaagctctgtttcaaatttatttttccattgggtgtttatggcgctcgtcatcgccgccgtgaatgtgttaaggcgatccagacaaatgcctgagccgatgtacagataaacagactacaaaaagcagggagacttatatgaacgatatattgataagaatagcccgtcgcataaaaaaaaatatcatttggatcatagcggtgccaattatattaggtgcggcggggtatatcctgccgtcacagatcgctgatcaaaagagctatacagctgaagatactttggctgtggggagctatgatcatccggtttataacagcacagaagagattccgcttctattaaagagcgactcctttttgaaggaggcgcttcctgatgaaaaggatgaagatgtagcagagatcaaagagaagcttacaatcaatacggaatccaaatcgttactgactttaagctatagtgacgaggataaggatagaacggaatctgtcttaaacgccatatcctccaccttcctcaaaaacgatcaaaagctgtatgcagaaagagaagccgtcatccgcagcagcatagacgcgcttgaaggcgagtcggtgagcgaggattccaaagtggataaagagagatttttatatgaactcaaaaacacacagcttaacctgaaagcggcaagtgttactgattccgaaaccgtaagtgagacagcaggcggcggtatgtctccgaaaaagaaagcagttctcggcgttatgattggccttacgattgcctttatgttcgttgtcattcctgaatttttcagagaatccttttaaaatcatacgatggagatgtgatcatgaccaattggaaacctctcgtatctgtcattacaccttcctataatgcgcgtgactatattgaagacacggttcattcggtattagatcagagccatcctcattgggaaatgattatcgtggatgattgctcaacggatgggacccgcgacattttacagcagtatgaaaaaatagacgaaagaattcatgtggtgtatctggaagagaactccggagctgcggttgctcgcaacaaagcgttggaacgcgctcaagggcgctacgtagcatttttggacagtgatgacaaatggaaaaaagacaaactggaaaagcagcttgagtttatgatggagcgctcctgtgcgttctctttcacgggctacagcttaatggcgcaggacgggaccccgctcgataaatttattcatgcgccggaaagcctgacgtacgatgacgccctgaaaaatacaattatcggctgcttgacggtgatgattgacagggagcaaacgggacagatccaaatgccgaatatcagaacgagacaggacttagccacatggctgtctcttttaaaaaaaggatttactgcctatggaatgaatgaatgcctggctgaatatcggcttgtcaataattcaatttccagcaacaaatggaaggctgcgaaaaaaacgtggtttgtctacagggagatcgaacggcttcattttatgaaagcaacatggtgttttgttcaatatgcaaaaaacgcggtgaaaaaaagattatagctgcaaacagagagaaaaggtgatgaaggtggaaacaaaagaagcaatcattcatgtcatcgttgccactgctgaatggggaaaagaccaattgagatacagaaggcaccggctggcagaatttttagctgctcaggaggaaacgaaggaagttatttgggtatgtccggctccgcgtgcccaagggaaagagtttcaggaagtccattctggcatcaggcaattcgctgtcaaagacctgctgcagaaaaaaatgtttcgtttcggacgatatacagatgtcttttacagacataagctctccccattactcgatgagcttacacctgcttctgcaaacggtgaacgctgctgtttatggtacacgtttcccggattcccgctgctgtcttcgctgtattcttgggatcaggtcatttatgactgcagtgacctatgggctgcgccgatcagcggccgatcaaatctgctgtctgaattccggcgaaaagtcattaaatcggcagagctgagaattatacaacgagcagattcaataacctgttcatcagattatcttcacaaggaagtagacaaaaaactgactgcaggacgagaaaaggttcatactgtggaaaacggtgtggagtatgagctgttttctgcaaataaacaagctcccgatcgcagtatactgcaggggagagaaggaatagtgttaggttttattggcgggattaaaccgaagctcgattttaaaatgattaaagaagcggcactgcaaaagcctgattggacatttttatgggttggcccggatgccaccaatggtgatgtttcgtttcaagagctgctgaggcttcccaatgtcatatggaccggtccggcagatccaaaagaagtgcctcattatatggagcttatcgacattggcattatgccatataaacaatcaccgtataatcaagctgtgtttccgctgaaactatttgaatttttagcggcaggaaaacctgttgtaggcactaatcttccgtcaacctcaaaaatgcaaaagccgtatgtatacgaatatgtagagggcgatcatccgattgattttatagccgcttgtgaaaaagttctcggtcaaaacggagacgagacctataaagaaatgcgccgaaacatcgcccggacacaagattggaattgcttatttagacaaattatgaaatatacagggattcaaaaacatgcgtagtcctataaattgggatgcgcgttttttgattatacgtgtttctttttgatgaagcttgttataataactaaggagaaggtataatggaaggaacggttctctatataaataaagacttcatttaattccaaaggagacttctttatgcttgacgaacgcatgattcgcattgttgttgcgtttattgtctcgctgctgacagttttaatcataaccccaatcgtaaaaaggattgcgattaaaataggtgcagttgaccagcccagcaatcgaaaagtacatgacaaaatcatgccccgcatgggcgggctggccatatttatcggggtggttgcaggcgtgcttgcatccggtatttacacagaaacaaggatgacggcaattacagtcggagcattcatcattattgtgttaggtattcttgacgataaatatcaattaagtgcaaaagttaagtttttgattcaattaggtgtagccattatgattgtaagcactggcttaaaaatggactttttctcagtaccttttttaacagaacgatttgagttaggatggatggcttatccgctgacggtattatggattgtcggcatcacgaacgcaattaacctgattgatggattggatggccttgctgccggtctttctgttatcggcctgtcaacgattgctgtcatggcgctatccggcggaaaagtgctcattctgtcactctcattagtcgttattgccagcacgctggggtttttgttttacaacttccatccggcaaaaatctttatgggagatacgggatcactgtttttagggtatagtatctcgattctttcattattaggcctgtataaaagtgtcacattgttcagtatcgttatcccgattattatattaggcgtaccgatttttgatacaacatttgctatcatcagaagaatattaaacaaacagccgatttcagcgcctgataagtcgcatattcaccatagactgatggcctttggcctttcacatcggatgtcggtcttagttatttatttaattggatttattttcagtatcagtgcgattgtacttaaaagtgccacaatttggctttctttgtttattatcttcattttgattatttttatgcaaatcatagcagaagtgacaggactcgtgaatgaaaaatttaagccgtttacaaagttttataaacggctggtgaaaaggaattaaaaactccggcttatgtgccggagtttttttctgcgcaaaaatgcccgatcctctaaaaggaccgggcattttttaataggatgaatcagttgttgaattcgttgtactgttgtttgagcttgtgctgctgtcattcgaatagctgcttccgttcgtcgtcccgtcagttgttgtgccagtgctgccagtgctgccagaactgcttgagctgtcagtcccgtcttcggtaccggaagtgccagtgcttgtatcaggagtataatctaaatgctcttgaagcgtttttctgactttctcgagatttgtagcatcaggttcaaagtaatatgtgttgttaggccctaaatacaaatcagaacctgtaatgctcaatgtgtcgatttttttgctggtaaagccgctgtaaatctgctgaagcgctaaaccttcagtaatgcgaatattggtttcaacgttttcgctggctttttctgcgattttatcaattttagcaatgttgcttgcacttgacatgcggtcaatcagcgcgtttaagatttgtttttgtctgtcattacggccaaagtctccgcgtttatcctgttttctcatccgggcatatgctaaggcttcttcgccgttcaaatgcatctcgccttttttgaagtaaatccgtttgctttcgtctacatcacttttttcatcgaaatcgaaaggcacgtcaacatcaataccgccgacttcattaatcacatctttaaatccgtcaaaatcaactgtgacatatttatcgatcgggatttgcaagaagttttcaacagtttcaactgtttcatctttaccgcctttgctgtaagcggcattgatcttcgtcttgcttcccgttgtgtcaccagctaattgcacacgtgtgtcacgcggaatgctcagcattttcatggttttatttttgggatccagggtaacaacaataagagagtctgatctccctttttgtcctttagtcgcgtaatcctctattcccataaataaaatagaaaatggttttttcttcatgtctacaacttcgttgcgaagatttgatttattcccgcgggatagggcatcgtacgattcatccgcagcgttaatggttttataaagtttatacccgccaagccctacaactaccaatagtgcaagggcgaacaataacattattctttttaaaattttcctacgtttgctctttttcttttttcgcacacgcactctaacgcgttcagccattattcagtctcctttatgtgattgacggctttttcaagatacgtcaactctccctctttaatatcactctttccatttgtcagttctgtcatccattcagaaaaagcgttggtttctttttcttccacgtatgtttcgaattcaacattttctgaataatggatttcctttaacagaaattgtgactcccttaattcattttcaatcttgccaagccatgtgtaatctgcagaagtatgcatgattcgcataagcttccgttctacaacacctatatgatttaatccttcagacactgatttcccataagcgcgaattaatccgccagcaccaagcttaatgcctccgaagtagcgtgtaacgacggcgcaagtatccttcagcctgcgtttttttaaaacctcgagcatcggcactcccgctgtaccgcttggttccccgtcatcattggctttttggatatgatcattctcgccaataacataagccgagcaattatgagtcgcattccagtgctgtttctttattttctgtataaattcctgtgcctcttgttcggtagaaacacggcttaaatgacagataaaacgcgatttttctataacaatctcgtgttctcccgcttctttcacagtaaaatagctgtgcagcatgctagctgaccctcctgctaagcataaaagactgcctatacaaattcgtacagtctttagaatttttgtgcgtattttggtatcataaagagtagatagtatataaaaatgtttttttctagaatatacgcattctttcattataattcgacataatttgcagatcaattacatttataataaaaatatatgacaacgccgtgacggagggaaattatgaataaaacaaagatggattccaaagtgctggattctattttgatgaagatgctgaaaaccgttgacgggagcaaggacgaggtttttcaaatcggggagcagtcacgccagcagtatgaacagctggtcgaagaactgaaacaaattaaacagcaggtgtatgaagtgattgagcttggcgataaacttgaagtgcaaactcgccatgcgagaaaccgtttatccgaggtcagccgtaattttcatagattcagtgaagaggaaatccgcaatgcttatgaaaaagcccataagctgcaggtagaattgacgatgatccagcagcgtgagaagcaattgcgcgaacggcgggacgatttggagcgcagattgctagggcttcaggaaatcattgagcggtcagaatcattagtaagccaaattacagttgtgctcaactacttgaatcaggatttgcgcgaagttggactgcttcttgctgatgctcaggcaaaacaggatttcggcttaagaattattgaggcgcaggaagaagagcgaaaaagagtctcaagagaaatccatgacggacccgctcaaatgctggcgaatgttatgatgagatcggaattaatcgagcggattttccgtgaccggggcgcagaggacggattccaagaaattaaaaatctccgccaaaatgttcggaatgccctttacgaagtgagaaggattatatatgatttaagaccgatggcccttgatgacctaggcctgattccaactttaagaaaatatctatatacaaccgaggaatataacgggaaggtcaaaatacattttcagtgcattggagaaacagaggatcagaggctagcgcctcagtttgaggttgcgctcttcaggctcgcacaggaagctgtgtctaatgcgctaaagcattctgaatctgaagaaattacagtcaaagttgagatcacaaaggattttgtgattttaatgataaaagataacggtaaagggttcgacctgaaggaagcgaaagagaagaaaaacaaatcattcggcttgctgggcatgaaagaaagagtagatttattggaaggaacgatgacaatagattcgaaaataggtcttgggacatttattatgattaaggttccgttatctctttgactatgatttgtaaaatagagccaaaaggcatattgaccgaatgctagagtatatagaacaataatacaaggaggcgtggcttgtgactaaagtaaacattgttattatcgacgaccatcagttatttcgtgaaggtgttaaacggatattggattttgaacctacctttgaagtggtagccgaaggtgatgacggggacgaagcggctcgtattgttgagcactatcatcctgatgttgtgatcatggatatcaatatgccaaacgtaaatggtgtggaagctacaaaacagcttgtagagctgtatcctgaatctaaagtaattattctatcaattcacgatgacgaaaattatgtaacacatgccctgaaaacaggtgcaagaggttatctgctgaaagagatggatgctgatacattaattgaagcggttaaagtagtggctgagggcggatcttacctccatccgaaggttactcacaacctcgttaacgaattccgccgccttgcaacaagcggagtttctgcacaccctcaacatgaggtttaccctgaaatccgcagaccattacatattttaactaggcgggaatgtgaagtgctgcagatgcttgcagacggaaaaagcaaccgcggtattggtgaatcattgtttatcagtgagaaaaccgttaaaaaccatgtcagcaatattttacaaaaaatgaatgtaaacgaccggacgcaagccgttgtggtcgccattaaaaatggctgggtagaaatgagatagtataataggagacttgccttttactaggcaggtctttttttaggctgccgtttcccttacaatagagttataaagcaataaggcaggtatcgaagctatgaatattgcagtcgtaacagacagcacggcatatattccgaaagaaatgcgtgaacaacatcagatacatatgatccctctccaggttgtttttagggaggagacttaccgtgaagaaattgagttggactggaaaagcttttatgaagaagtgaaaaaacataatgagctcccgacgacttctcagccgccaatcggcgagctggttgcgttgtatgaagagcttggcaagtcttatgatgcggttatcagtatccatctttccagcgggatcagcggaacattcagcagtgcagcagcggctgattcgatggtcgacaatattgatgtgtatccatttgactcagagatcagctgcttggctcaaggcttttatgcccttaaagctgctgaattaatcaaaaacggagcatcatcgccggaagatattataaaagaactggaagaaatgaaaaaaacagttcgagcttattttatggtagatgacttagcccatcttcagcgcggcgggcgattaagcagcgcccaagccttcattggtagtcttctaaaggtaaagcctatccttcattttgacaataaggtaattgtgccttttgagaagattcgcacacgtaaaaaagcaatttcgcgaatttatgagcttttagacgaagatgcgagtaaagggttgcctatgcgagctgctgttatccacgctaatcgagaggaagaagcagcgaaaatcattgaagagctttctgcaaaatatcctcatgttgaattttataacagctattttggcgcggtaatcggcactcatttgggtgaaggtgcgttaggaatttgctggtgttttaaataaggccaaatctccgtttttagagcggagatttttttatattcttattttaatagttggacagaaaatattcattcaggcatactgtttcgaaaggaggcgtgctatgtgaatgtgccagttgaaaaaaacagttccttttcaaaagaattgcagcagacgcttcgaagccgtcatttgctcaggactgagctctcattttccgatgagatgattgaatggcatatcaagaatggatatatcactgctgaaaattctatatccataaataaacggagatatagatgtaataggtgcggacaaactgatcagcggtatttttctttttatcactcatctggaaagaataagctgtattgccgttcctgtgtcatgatgggcagagtgagtgaggaggttcctttatattcatggaaagaggaaaatgaatcaaactggaagtctattaagctgacatgggatggcaagctttcaagcggacagcaaaaagccgccaatgttttaattgaagcaatatcaaaaaaagaagagctcctcatctgggcggtttgcggcgctggcaaaacagaaatgctgtttcctggtatagaatcagcgttaaatcaaggactgcgtgtatgtattgcaacacctcgcaccgatgttgtattagagcttgctccaagactcaaggctgcctttcagggtgctgacatttcagcgctttacggaggaagcgatgacaaagggcggctatctccgcttatgatttccactacgcatcagcttttgcgatataaagatgcaatcgatgttatgatcattgatgaagttgacgcttttccatattctgctgatcaaacccttcaattcgctgttcaaaaagcaagaaagaaaaacagcaccctcgtttatttaagtgcaacacctcctaaagaattaaaaagaaaagcactgaacggacagttacattcagttcgcatccccgcaagacaccaccggaaacctttacccgaaccgcgctttgtatggtgtggaaactggaagaagaaattaaaccgaaataaaattccgccagcggtgaaaagatggatagagtttcatgtaaaagaagggaggcctgtttttttattcgttccttccgtttctattctggaaaaggctgctgcgtgctttaaaggtgttcattgccgaaccgcatctgtgcacgcggaagacaagcatagaaaggagaaagtgcagcaattcagagatggtcagctcgatctattaatcacaacaacaatactggaaagaggcgtcacagtccccaaggtgcaaacgggtgtactaggagcggaatcgtctatctttacggaaagcgcacttgttcaaattgcaggaagaaccggccggcataaagaatatgcggacggcgatgtcatttactttcacttcggcaaaacaaagagtatgctcgatgcaagaaagcatataaaagaaatgaatgaattggcagcaaaagttgaatgtacagactagccattatttgaaaacgtggtacagtatactcatataaccgatgatgaggagctgtaaaaatgcttgtcaattcaaaagaaatcgtaatgaaagaactgctcgaccgatatatggaccagcttcatatggcctgtacttgccaagtatgccaaaacgatgtattggcactttctttaaacaaagtgagtccatcctacgttactgattttaaaaagatcgcatatacgaaagctgagctggtagataaacaaaaaaacacagcaatgcttgtcattttggctgaatctgctgcagtagtttcagagagtccaagcgatttatgtcaaacgaagcaggaggaggcattcataaactgatctgtttattatgtgattcgcaattttctcaagatgttacatggagagccctttttttactaaagcctgatgaaaaggtttgttattcttgcagaagcaaattaaagaaaatcacaggacatatctgccccctgtgcggcagacctcaatctgttcatgccgtatgcagggattgcgaggtgtggagaacaaggatcagagacagtttgctattgcgtcaaaaccgttcagtttacacatataatgatatgatgaaagaaacgctctcccgttttaaatttagaggagatgcagaaatcataaatgcatttaaaagtgatttttcttcaaccttttctaaggtttaccccgataagcattttgttcttgtacctattccgctgagcaaggaacgggaagaagagcgcggatttaaccaggcacatctcttggcagaatgtttagaccggccttcccaccatcccctcattcgcctgaataatgagaaacagtcaaagaaaaagaaaacagaacgcctgctgtcagagtgcatttttgatacaaaaaataattcagcagaaggtatgaatatcattttaatagacgatctttatacaacaggcgccaccttgcacttcgcagcccgctgcttattagaaaaaggaaaagccgcttcagtgtcatcttttaccttgatcagaagctaaatgattctgtttttatgccgatataatcactagaaattgacacaggcatattatctaataaggagaaaaaaagatgggagaactggctaattgtccgaaatgcaatgctttatttttaaaaacaaagctgcaaaccgtatgtcaggcgtgtattaaggaagaagaaaaatcatttgagactgtctataaatttttaagaaaacaggaaaaccggcaatcaactttgagccggataactgaggaaacaggtgtggaagaagagctgatattgaaattcatcaggcagaagcgaattcagatcactcatcttcctaatttggcatacccttgtgaaaggtgcgggacatcgattagagaaggcaagttctgcaaggcttgccagtctgatattaaggatcaaatggatcatttgaaccacgaggatgctctgaaaatcgagaaagaaaatagtaaaaaagacacatactatgcctataataccaaaaacagctgattccctaaactaactgaaaacgcagtcgataaaagggttaagattgtttaaagactgcaacggaaagcgagaggaatcctatgaaaatcaatcaatttggaacacaatccgttaatccatatcaaaaaaattatgataagcaagcggtgcaaaaaactgttgcacagcctcaagataaaattgaaatttcatcacaggctaaagaaatgcaacatgcatccgacgcagtcactggttcacgacaggaaaaaattgcgcagcttaaagcgcaaattgaaaacgggtcatacaaagtagacgcaaatcatattgcgaaaaatatgattaatttttataaaaagcaataaaaaaggagaaagcccatgtcagcgaaggcaattattgaacaattgaagcgactttgcgttctgcatgagcacctgctcacgctgtctgaagaaaagacggaagcgctcaaagccggcaaaacaaaagagctttctaacattttgacaaaagagcaaaaatatattcaagcaatcacgcagacagaagatgaccggatcaaaacaacttcggcctttctcggatatagcgaaaataatactatttccgcatgtatcgccaaaacctcaggcagtgaaaaggaagagctggaacaactatacgaatctctttctcaagttctcggacgtctgaaaaaagtaaatgagatgaataggcagctgacaagagacgcgctgcaattcatctctatttcgtacgatatgctggttcctaaggaaaataacttcaattacagcaaatcaattaaagctgagctgccgaaaagtagcaaaatgaaactgtttgattcaaaagcttagcagaaaggaattcagaaaatgacatctacctttatggggcttgaaactgcaaggcgggcgttaagcgctcagcaggcagcgttaagcactactgcaaataacgtggcaaatgccaatactgatggttatacaagacagcgggtctcattggaggcaactgactatttccctgctgtatctaaaaatgcagaaaaaacagcgggacaaatgggtacgggcgttcaaggaaaatcagttgagagaataagagatatctttcttgactaccaataccgtcttcaaaacaacagtgccggatactatgacacgaaggcaaaagcgctgtcccaaatggaaggcgttttaaatgaaacggatgacagcggcttgaacagtgtgctcaattcgttttggaattccctgcaggaattatcgaataatacaaatgaagaaagtgcacgttctgttgttgctcgaaaaggacaagctgtagctgaaacgtttaattatatttctgaatcacttacaaatgtccaatcgaatttaaaagcagagctaaatacaactgtgttggatgtcaattctctgctttctcagttaaacagtttaaataagcaaattgcacaagtagagccggtcgggcttcttccgaatggcttatatgaccagcgagatttgctgatcgataaattatcctcaatggttgatatcaaagtcagctacaacaaatcaggcgggaatgcacttgcatctgctgaaggaactgtatcaattgaaatccttgataaaaataaacagtcgctaggaactgttttggacggtaaaaattacgaggtttcagaacttgcagccaactatgataatgaaactgggttagtatcaagtatttcaatcggggatacagctgtacaggcggagtcctttagcagcaagggatcccttttagggtttatagagtcttatgggtatataacagcagatggccaagaaaagggcgtatacccggaaatgctttctgatcttgacaatatggcgcttgaattcgcgaaagctttcaatgaagtgcacagaaatggtgtgaccaagagcggtgaacaaggcggagacttttttgattttactggcggtgaaactgaacctgccaagggcgcggcgggcaagatcaaagtggctgacagcataatagattcaaaaggcgcaaacattgctttctcactgactggcgcagccaacgataacgcaaatgctacaaaattagcaaatgttttaaccggtaaaataaccattaacggtaaagaaactagtgttttagattattatgcgggtctgattggcgagctagggatcgaagctcaagaggctaatcgactggcgtctaatacagaaacacagctgaatgatgctgacataaaccgtcagcaaatgagcgcagtttctttagacgaagaaatgacgaatatgattcaattccaacacgcatacaatgcagctgcaagaatggtgactttacaagacgaattgcttgataaagtgatcaacggcatgggtgttggaggaaggtaggtagagtcacatgagagtaacacaaggcatgatacagcaaaactcactgagatatatcggttcaagctactcgaagctggataaactccagtcgcagatttcttcaggaaaaaaaatctcaaaagcttccgacgatcctgtagtagcaatgaaaagcttaaagtataatacgcaactgtctcaagtgcagcagtacaaaagcaatgcttctcaagcctttacctggctcgaaaacacagaaacaaacattacagaaggaattgacatcttgtcaaaggtcagagaattagcggttgaagctcaaaatgatacaaacggcgagccggagcggcaagcgattggcgtagaggtaaagcagttaaaggaacagcttttaaatattgcgaatacacaagtgaacggcagatatatctttaatggcacaaattcagataagcctccggttacagataacggagacggaacttatacaatttctgatacagctgatgtcgtagtcaatatatcaaataatatgtcattgaaagtgaattcagatccaaagtcagcttttggaggcacttctgaaagcgggcagaatgtatttgaaatgcttgattcttttgagaaagcactaaattctggttcgctagatggcatggacagtgttttaaatgatattgatcatttttctgacggcatgagcgctgaacgatctgatcttggagcgagatataatcgtcttgaactggttaatacaagactgtcagcgcaagaagaaacagctaccaaagtgttatcagacaatgaagatgtagaactggaagaagtaataactgaatttattgcgcagcaaagtgtgcacagggctactctggccgttaatgcgcaaattgttcagcctacattgattgactttttaaagtaagcggctcttaggagttcgctttttttatagttcaggaggtagagtgatgcagattcccagattgattatgcatagtgttcaaggaaaaattggtttaacaacgacgcctgccagcttaaaaatggagcagcctcaagctgatctagagatcgaacagccgagtgcggaaatggaaatatcggtgacacctggaaaactcacgattgaccagacacaagcatgggaagaattagacagaaagcatgttttcaagagaattgaagaagccgcccaacaagggcatgaggatgtaatggagggaatagcacgcactgcagaagaaggcgacgagcttatgaagattgaaaataaggggaacccaatcgcttcacaagcaaggaggaactctgaaatgcaccaaattcaattaggcgaaaattatgctccttctctttcgagggtgaaaatacaatatactccgtcacagcttgatgtgcagattacgccgcgaaagcctgttattcaggctgagccgcataagccaattgttgaatatacgccaggaaatgttaaggttgacatgcttcaataccctgatttaaatatagatgtagaatacccgaaagaatcacccgaaaagtaaaaagaaaaggatcgtgaacaatgatcattcatacgaagtaccatggccaaatgaacataaaagaagaacaaatcattctttttgaaagcgggattccaggctttttagaagaaaaacagttcgtcatacttccgctttcagaagactctccattcgtggcactgcagtccgtcacttcagaaaatcttgcgtttatcgtcgtaagtccgtttatcttttttaagaattatgaatttgatcttgatgaatcaactgctgaacttttggatatcgataatattcaagacgtagaagtcatgacaatattgactatggcagagccatttgaaaagtctactgcgaatttattggctcccattattgtgaatcgcaagaacatgatggctaagcaagtcgttttacacgactcctcatatacgacaaagcatccgattggaggagaatcatgctagttttatcgcggaaaataaacgaagcgattcaaataggtgctgatattgaagtaaaagtgattgcggttgaaggggatcaagtgaagcttggaattgacgccccaaagcatattgatattcacaggaaagaaatttacttgaccattcaggaagaaaataaccgtgcagcagcgttatccagcgatgtgatctccgcattatcctcacaaaaaaagtgaggatttttttatttttgtattaacaaaatcagagacaatccgatattaatgatgtagccgggaggaggcgcaaaagactcagccagttacaaaataagggcacaaggacgtgccttaacaacatattcagggaggaacaaaacaatgagaattaaccacaatattgcagcgcttaacacactgaaccgtttgtcttcaaacaacagtgcgagccaaaagaacatggagaaactttcttcaggtcttcgcatcaaccgtgcgggagatgacgcagcaggtcttgcgatctctgaaaaaatgagaggacaaatcagaggtcttgaaatggcttctaaaaactctcaagacggaatctctcttatccaaacagctgagggtgcattaactgaaactcatgcgatccttcaacgtgttcgtgagctagttgttcaagctggaaacactggaactcaggacaaagcaactgatttgcaatctattcaagatgaaatttcagctttaacagatgaaatcgatggtatttcaaatcgtacagaattcaatggtaagaaattgctcgatggcacttacaaagttgacacagctactcctgcaaatcaaaagaacttggtattccaaatcggagcaaatgctacacagcaaatctctgtaaatattgaggatatgggtgctgacgctcttggaattaaagaagctgatggttcaattgcagctcttcattcagttaatgatcttgacgtaacaaaattcgcagataatgcagcagatactgctgatatcggtttcgatgctcaattgaaagttgttgatgaagcgatcaaccaagtttcttctcaacgtgctaagcttggtgcggtacaaaatcgtctagagcacacaattaacaacttaagcgcttctggtgaaaacttgacagctgctgagtctcgtatccgtgacgttgacatggctaaagagatgagcgaattcacaaagaacaacattctttctcaggcttctcaagctatgcttgctcaagcaaaccaacagccgcaaaacgtacttcaattattacgttaattttaaaaaagaccttggcgttgccagggtcttttaatttaaatttctatctcctaatcattcctcatcctgtcactaactcatgatataataaccggattctccactaactttttataaatgtatttccatacaagaaatctaaaacagaagatttttttccaaaaatatgtgtaatcttatctcgacttagtcgatataaacgatagattggggcataggggatgatcaattgaacattgaaaggctcactacgttacaacctgtttgggatcgttatgatactcaaatacataatcagaaagataatgataacgaggttcctgttcatcaagtttcatataccaatcttgctgaaatggtgggggaaatgaacaagcttttggaaccttcgcaagttcatctgaagttcgagcttcatgacaagttaaatgaatactatgtaaaggtaatagaggactctacaaatgaagtgatccgcgaaattccaccaaaacggtggcttgatttttatgcggctatgactgaatttcttgggttatttgtagatgaaaaaaagtagaataggagtggtttgagatggtcacaagaataacaggtctggcgtcaggaatggatatagatgatatcgtatcaaagctgatgcagacagaaagagcgccgcttgataagctgacacaaaaaaagcagactcttgaatggcagcgtgacagctatcgtgaagtaaactcaaaaataaaagaattgcaagattatatgtctaaaaatacgttgacatatccgagcacgtatcagagcaaaactgtgacaagctctaatgagtctgtgttaactgctacaggaagcgtaagtgcgccaaattcttcgtctactgttgaagtggcgagcttggcaactgcagcaacgtataaggcaaacaattatacgggatacacacaaggcgattacaatttggcatttaacgttgttgcgcctggcgaaacaacagcaaaaacagtgaacattagtgtgacgagtgccgatacgattgataatgtgatttctaaacttaacagctcagatctaggagtatcagcatttaaagataaaatttggaatggtacagagtacgtagaaacgattgcgttttcttctaaagcaacaggtgcaggaggaagcatacaggcagcagactctgctacagctgactttatgtccggtcagcttggtttttctttggatgctgataataagcttactgcttacaaagaaggcacaaatgccaaagtcacaatcaacggctttgaaatggagaagctgacaaacaatttcacggtgaatggtgttacttattcgattaaaaatacaactgcagccacaggccctgttaccacatctgtttctactgatgttgatgggatttataaccaaatcaaagagtttgtagataaatacaatgaactggttgacagcctgaatgaaaagctgaaagaagaaaaataccgagactatacgccactcacgagtgaacaaaaagaagccatgtccgataaagaggtagagctctgggaggagaaggcgaaaagcggattgctgagaaacgattcaagcatcagcactggcacgaaccaaatgcggactgacttttatactcaagtgaatgcggatgggaaaacctatcaattaactgaatttggcatcacaacttcaagtgcttaccaactgcgagggcacttagagattaacgaagagaaattgaaagcaaaaatagcagaagatcctcaaggagttgctaatctttttacaagtggaacaaatgatagtaactatagcgataaaggtattatgaagcggattactaatacacttagaagtactgtgaaaagtattgaagctaaagctgggaactcgacaatgggagctagtagctattccattggaaaaaatttaaactcgataagtactgaaataactgatatgcaggacagattgaataccatagaaaaccgctattattcaaaattcagtgcaatggattctgcgattcaaaaaatgaacgaacaagcgtcctatttatcacagcttcttgtacaataaatgtaatttggaggatgacacatggcgatccaaaatccatatacagcctatcagcaaaattcagtgaatacggctacacccggggagctgacgcttatgctgtataatggctgtttgaaatttataagacttgccgctcaggccattgagaatgatgatatggaacgtaaaaatgaaaatctgattaaagcgcaaaatattattcaggaattaaattttacacttaaccgtaacatagagctttccgcttctatgggtgcgatgtacgattatatgtatcgcagattggtacaggcaaatatcaaaaatgatacgggcatgctggctgaggttgaaggttatgtaacagattttcgcgatgcttggaaacaagccattcaaagtgagcggaaggaccggcacggatcaggcgggatcgcatgaataatatagatcaactatacactgagacgaagagtatgctgtcacacatacaaaatacgccggaaagcgatgaacttttaaagcaaattgaagactttgtggctacacggtctgaactgattcaggagatatctctgccgctttcagaagaagagcgaaagcagatgaaacttattttgacatgggatcagctgattgtgaaggaaatggaaagactgaagcagtcaatcgcaacagaacttcagcagatgaaaagaaaacgtgtgatgcatacgacgtatttaaacccttataacaacattacgattgacggcacatattatgacaagcgtaaataggtgagtgccttgaagagcattgaagattatacgcttttatcagcttattatcatcttctttttaccatcgaagaggggttgtgttatttgatagaggctgaagagaatttatcaaaaacagaaggggatcggatctaccaagatctgatccaagcctttttttatttggattcaacacattcaacacttctcttcattatggattcgcggtgtgctgaaatttgtgtgaaagcatttgaccaaatttttgcggagtttgatcaattggtctctttctcttttccctctcatgagttctgtgagtatttaaaggaacattttctgattcattatagaaaatggatgctgtctattcatcaatgtatggaaccctttttaatcaattaggcgtgtgtgaggtatttgtttcgttcaatcagcatatacatatacctccgaaccgccaataacagagcaaatacaaacaaaattcgacaaagttcactgaattttcacaaaagatttatgtttcagcaggaattgtaaagggtaaaagagaaatagatacatatccttaataaaagggaggcgttctttgatgaactataacatcagaggagaaaatattgaagtgacacccgcgttaaaggatcatgtcgagaggaagatcggcaagctggagcgctattttgaccatagcgtggatgctgatgtgaacgtcaacttgaagttttacaatgacaaggagtctaaggttgaggttacgattccgatgacagatctggcgcttcggtccgaggtgcataacgaggatatgtacaacgcaattgatctcgcaacaaacaaactggaacgtcaaatccgtaagcataaaacgaaagtaaaccgtaaattccgtgagcagggctctccaaaatatttattggcaaacggtcttggctctgatacagatattgcggttcaggatgacatagaagaggaggagagcttggacatcgtccgtcagaaacgctttaatttaaagccgatggatagtgaagaagcgatcttgcaaatgaatatgctcggccataatttctttgttttcacaaatgcggaaacaaaccttacaaatgtcgtgtaccgcagaaatgacgggaaatatggcttaattgaaccgactgaataatgaagagaagccttccgtgatgtccgcggaaggtttttgtttttcttatttgcaaattctttggaaataacaaaaggtatgatatgataatgagaggtatacatggactagtaaattatttatacatgcctctaaaataggcgtgtgatgatagaggagcgttataaatgcttggaattttaaataaaatgtttgatccaacaaaacgtacgctgaatagatacgaaaaaattgctaacgatattgatgcgattcgcggagactatgaaaatctctctgacgacgcattgaaacataaaacaattgaatttaaagagcgtcttgaaaaaggggcgacaacggatgatcttcttgttgaagctttcgctgttgttcgagaagcttcacgccgcgtaacaggcatgtttccgtttaaagtccagctcatggggggcgtggcgcttcatgacggaaatatagcggaaatgaaaacaggggaagggaaaacattaacgtctaccctgcctgtttatttaaatgcgttaaccggtaaaggcgtacacgtcgtgactgtcaacgaatacttggcaagccgtgacgctgagcaaatggggaaaattttcgagtttctcggtttgactgtcggtttgaatttaaactcaatgtcaaaagacgaaaaacgggaagcttatgccgctgatattacttactccacaaacaacgagcttggcttcgactatttgcgtgacaatatggttctttataaagagcagatggttcagcgcccgcttcattttgcggtaatagatgaagttgactctattttaattgatgaagcaagaacaccgcttatcatttctggacaagctgcaaaatccactaagctgtacgtacaggcaaatgcttttgtccgcacgttaaaagcggagaaggattacacgtacgatatcaaaacaaaagctgtacagcttactgaagaaggaatgacgaaggcggaaaaagcattcggcatcgataacctctttgatgtgaagcatgtcgcgctcaaccaccatatcaaccaggccttaaaagctcacgttgcgatgcaaaaggacgttgactatgtagtggaagacggacaggttgttattgttgattccttcacgggacgtctgatgaaaggccgccgctacagtgaggggcttcaccaagcgattgaagcaaaggaagggcttgagattcaaaacgaaagcatgaccttggcgacgattacgttccaaaactacttccgaatgtacgaaaaacttgccggtatgacgggtacagctaagacagaggaagaagaattccgcaacatctacaacatgcaggttgtcacgatccctaccaacaggcctgttgtccgtgatgaccgcccggatttaatttaccgcacgatggaaggaaagtttaaggcagttgcggaggatgtcgcacagcgttacatgacgggacagcctgttctagtcggtacggttgccgttgaaacatctgaattgatttctaagctgcttaaaaacaaaggaattccgcatcaagtgttaaatgccaaaaaccatgaacgtgaagcgcagatcattgaagaggccggccaaaaaggcgcagttacgattgcgactaacatggcggggcgcggaacggacattaagcttggcgaaggtgtaaaagagcttggcgggctcgctgtagtcggaacagaacgacatgaatcacgccggattgacaatcagcttcgaggtcgttccggacgtcagggagacccggggattactcaattttatctttctatggaagatgaattgatgcgcagattcggagctgagcggacaatggcgatgcttgaccgcttcggcatggacgactctactccaatccaaagcaaaatggtatctcgcgcggttgaatcgtctcaaaaacgcgtcgaaggcaataacttcgattcgcgtaaacagcttctgcaatatgatgatgttctccgccagcagcgtgaggtcatttataagcagcgctttgaagtcattgactctgaaaacctgcgtgaaatcgttgaaaatatgatcaagtcttctctcgaacgcgcaattgcagcctatacgccaagagaagagcttcctgaggagtggaagcttgacggtctagttgatcttatcaacacaacttatcttgatgaaggtgcacttgagaagagcgatatcttcggcaaagaaccggatgaaatgcttgagctcattatggatcgcatcatcacaaaatataatgagaaggaagagcaattcggcaaagagcaaatgcgcgaattcgaaaaagttatcgttcttcgtgccgttgattctaaatggatggatcatattgatgcgatggatcagctccgccaagggattcaccttcgtgcttacgcgcagacgaacccgcttcgtgagtatcaaatggaaggttttgcgatgtttgagcatatgattgaatcaattgaggacgaagtcgcaaaatttgtgatgaaagctgagattgaaaacaatctggagcgtgaagaggttgtacaaggtcaaacaacagctcatcagccgcaagaaggcgacgataacaaaaaagcaaagaaagcaccggttcgcaaagtggttgatatcggacgaaatgccccatgccactgcggaagcgggaaaaaatataaaaattgctgcggccgtactgaatagttcgccccggcaagtttactgaccgcggcgcctgcaggcgcctgcggatcttttaatgaggtgaatgaaatggaattatcagaaattagagcagagctcgaaaatatggcttctcgtttagcggactttagggggtctctttgacctcgaatcaaaggaggcccgcattgctgagctagatgaacaaatggctgatccggaattctggaatgatcagcaaaaagctcaaacggttataaatgaagcaaacggtttaaaggattatgtcaattcgtataaaaaattgaatgaatcccacgaagaattacaaatgactcatgatcttttgaaagaagagccggacactgatctccagcttgagcttgaaaaagaactaaagtcattaacaaaagagttcaatgagtttgagcttcagcttcttctcagcgagccgtatgataaaaataacgcgattttagaactgcaccctggtgctggcggtacagagtcacaggactggggctctatgcttcttagaatgtatacaagatggggagagcgccgcggctttaaagtagagactctcgattaccttccaggtgacgaggcgggaatcaagtcagtgacattgctcatcaaaggacacaacgcttacgggtatctcaaagcagaaaaaggtgttcatcgtcttgtgcggatctcaccatttgattcatcaggccgccgccacacatctttcgtttcatgtgaagtcatgcctgaatttaacgatgaaattgatattgatattcgtacggaggatattaaagttgacacgtaccgtgcaagcggcgcgggcggacagcacgtcaatacgacggattcagccgttcggattactcacttgccgacgaacgtagttgtgacatgccaaacggagcgctcacaaattaaaaaccgtgaaagagccatgaaaatgctgaaggccaagctgtatcagcgcagaattgaagagcagcaggcagagctggatgaaattcgcggtgaacaaaaagaaatcggctggggcagccaaatccgttcttatgtattccatccgtattccatggtaaaagaccatcggaccaatacagaaatggggaacgttcaagctgtaatggatggtgacattgatacgtttattgatgcctacctgcgttctaagctttcataagctgaaaaacacacctgatgcatacgggtgtgtttttttatttcttatatccttgatttcactgctgctttagcatattaccactgtatttgggtgttatttacatctaatcagggaaggattaaaatgctatcggagagcattggaagaaacggaggatatatgatggacgtacggaataaaacattgtggattttgcgggattatgtatacatattgataggagcagcgattacggccgtgtcctttaatgtatttttgcttccgaataagattgccgccggcggggtcagcgggatcagtacgattttacaatcatatggttttgaagcagcgtatgtacagtggattattaatatccctttatttattgctggcgtcattttgctcggcgggaaatttggactaaagacgcttgcaggttctgtgtttttgccgctagtagtgtttctgacaagggatattcagcccgccactcatcatgaactcctggcggcgatttttggcggtgtcgggataggtatcggaattggtattgtgtacttagggaaaggttcgacgggaggtacagccttggctgcacagatcattcataagtactccggtctgtcattggggaagtgtctcgccatcattgacggaatgatcgttgttacggctatgattgtatttaatattgagcaaggcttatatgccatgcttggcgtctatgtgtccagcaaaaccattgatgttgtgcaagtcggctttaatcgttcaaaaatggcgctcatcattacaaagcaggagcaggctgtcaaggaggctgtcttacagaagattgacagaggcgtgacaaaaatttctgcagtcggcggatatactgacgatgaccgtccgattttaatgtgcgtggttgggcaaactgaattcaccaaattgaaacaaatcgtcaaacagattgatgagtcagcttttgtaattgtagcagacgcgagcgaggtgctgggcgagggtttcaaacgcgcttaaacgaggttataatatggaagagatcgtaaaggagttgtgcttctcaacatgaaatcaaagttatcgatactaatgattggatttgcgctttctgttctgttggctgcctgcggatcaaacgatgcaaaagaagagaagacagacactggcagcaagacggaagccactgcatctgaaggggaagaattatatcagcaaagctgcgtaggctgccacggcaaggatttagaaggtgtgtcagggcctaatctccaagaggtcggaggcaaatacgatgaacacaaaattgaaagcattattaaaaacggccgcggcaatatgccaaaggggcttgtagatgataacgaagccgctgttattgccaaatggctgtcagaaaaaaagtaagataaaaacatccttgccgagtgctggcaaggatgtttttatgccttgacaatatgaatgaaaagaaactgtaatagtattatgtctaaatttgacgtataatgaagtgtattgaaaaagggaactttcagatttttcatctttttacaaatgaatgggtcataaattgtcgaatgcattcgaagagtatgaccgtgtgatagataaaatgatataaaagattaggtgatttcatgatagagatgaaggaagtatataaagcctatccgaacggcgtaaaagcactcaatgggatttctgttaccattcatcccggcgagtttgtgtatgttgttggtccgagcggagcaggtaaatctacttttattaaaatgatttacagagaagaaaaaccgacaaaaggacaaattttaatcaatcataaagatctcgcgacaattaaagaaaaagagattcctttcgtgcgccgcaaaataggtgttgtctttcaggatttcaagcttcttccgaaacttactgtttttgaaaatgtggcatttgcccttgaagtgattggagaacagccgtctgtcattaagaaacgggtgcttgaagtgcttgatctcgtgcagctgaagcataaagcgcgacaatttcctgaccagctttcaggcggggagcagcagcgtgtatctattgccagatcaattgtgaacaaccctgatgttgtcattgctgatgaaccgacaggaaaccttgatccggatacgtcctgggaagtcatgaagacgctggaggaaattaacaaccgcgggacaacagtcgtgatggcgacacataataaagaaatcgtaaacaccatgaagaaacgtgtcattgcaatcgaagatggtatcattgtgcgtgatgagtcaagaggggagtatggttcatatgattaaaattctcgggcgccacttgcgtgagagttttaaatctctcgggagaaacacatggatgacatttgcatccattagtgctgtaaccgttacgctgattttagtcggcgtgtttttagtgattatgctgaatttgaataacatggccacgaatgcagaaaaacaagtcgaaatcaaagtgctgattgatctgactgcagatcagaaggcacaggacaagcttcagaacgatattaaggaactgaagggcattcagagtgtcactttttcatctaaagaaaaagagcttgaccagctggttgacagttttggtgacagcggaaaatccctgacaatgaaggatcaggaaaacccgcttaatgatgcgtttgtcgtcaaaacgacagatccgcatgatacgccgaacgtggcgaaaaagatcgaaaaaatggatcatgtttataaagtcacttatggaaaagaagaggtcagccgtttgtttaaagtggtcggcgtttcccgcaacatcggaatcgcgttaattatcggcctggtatttacggcgatgttcttaatttccaacaccattaaaattacaattttcgcaagaagaaaagaaattgaaatcatgaagcttgtcggcgcgacaaactggtttatccgctggccgtttttccttgaaggattgctgctaggcgtattcggttctgtgattccgattgcactggtgctgagcacttaccaatacgtcatcggatgggtcgttccaaaggttcaaggatcatttgtctctcttcttccttataatccatttgtattccaagtttcgctagtgctgattgcaatcggcgcagtaattggagtatggggaagtctgacttccatccgcaagtttctgcgagtataaagtgaaaaagccgttccgttttcgggacggcttttcatttgccttctttttcttctatgattacatgaaatctccatcctttacatatactatctctaggttttggtaaagacagtctggcatacaggaggagtaaaggatgaatcaaaaaataatggctgtgatagcagcagggagcatgctgttcggaggcgccggtgtatatgcgggaatcaacctgcttgagatggataagccccagactgcagcagttcccgcgacggcacaagctgactctgaacgggataaagctatggacaaaatcgaaaaagcgtatgagttaatttcgaatgagtacgtagaaaaagtagatagagaaaagctgctcgagggagccatccagggaatgctgtctacgctaaatgatccttattctgtttacatggacaagcagacagctaagcaattttctgattctcttgattcctcatttgaaggcatcggggctgaggttggaatggaagacggcaaaattattattgtttctccattcaagaaatcgccagcggaaaaagccgggttgaagcctaatgatgaaattatcagcatcaatggagaatcgatggccggcaaggatttaaaccacgctgtgttaaaaataagaggaaaaaaagggtccagcgtttcaatgaagattcagcggcctggaacgaagaagcagttgtcattccggatcaagagagctgagattccgctcgaaacggtttttgcatcagagaaaaaagtacaggggcattctgtcggatatattgccatctctactttttctgagcacaccgcagaggattttgcaaaagcgctgagggagcttgagaaaaaagaaatagaaggacttgtcattgatgtacgcggcaacccgggtggatatcttcaaagtgtggaagaaattcttaagcatttcgttacaaaggatcagccgtatattcagattgctgaacgcaatggagataaaaaacgttatttttcaacattgacccataaaaaagcgtaccctgtcaatgtgattacggataaaggaagtgcctctgcatcagaaattcttgccggcgcattaaaggaagctggccattatgatgttgtaggcgatacgtcttttggaaagggaacggttcaacaggctgtgccaatgggggacggcagcaacatcaaattaacgctttacaagtggctgacgccaaatggaaactggattcataagaaaggaattgaaccgaccattgcgattaagcagcccgattatttttccgccgggcccttacagctgaaagagccgcttaaagtggacatgaacaatgaagacgtcaagcatgcgcaggtattgttaaaaggtctcagctttgatccgggacgtgaggatggctatttcagcaaagacatgaaaaaagcggttatggcttttcaggatcaaaacaagctgaataaaaccggtgtgatcgacactcgcactgcagagacattaaatcagcagatagaaaagaaaaaatcagatgaaaaaaatgatttgcagcttcaaacagcattgaaatcattatttgtcaattaaaggagatggtatttcatctcctgtttctttgtgcttaaagagattatggatcataagtcacataaaaaatgagtttttgacaagaaattaaaaaaattttcacaaataaacatttataaaggactgttattacccgatatcaatatatgagagagactttctaacgagttaatatgcatttaaaatgaaacttttgcaagttgcctagtctttgtttacttcatacaatataagaaggttctaaaaagaacagtaatcaggttaatggcagctgaacgacaggtatttaaagagtaacgttagcgagaatgcttgttagcactccagtactgctgcttatactggcccgtgcttatctgtataaagaaaatgggggttcacaattgaagagggcaagtattgtgcgtgaaaaaaaatattatgaattagtggaacaattaaaagacagaacacaagacgtaacattttcagctacaaaagcactaagtcttcttatgctgttcagcagatatttggtcaattacaccaatgtcgaatcagtaaatgacattaatgaggaatgcgccaaacattattttaactacttaatgaaaaaccataagcgattaggaattaatctgacagatataaaaaggtcgatgcatctaatcagcgggttattggatgtggatgtaaaccactatttaaaggatttttcactatcgaatgtcacgctgtggatgacgcaagagagataaactctcctgaggatatccaagccatttaatatttgatagaatatgagtaacatgtttggcttgaggcggtgagagatagtgtctgttcaatggggaattgaactgttaaaaagcgcgggcttgttcttcttacacccgcttttctggttttttatcatcataaccttggctttcggctatgtaagaatcaaacgggaacgaaaaacctttcatacaagaatagcagatatttatgatgatctgaaatttacatatacaaagggactgattccaggtcttcttttgtcagttattttaggtggactcggaatatcgattcctctcggtttacttgcgattattgccgttatcactgcagcggcagcgttcactcttcgcgcaaactggatgtctgctgcatatatcgtcagtgtgagtatgctgataggttttggactgcaaatatatcaggcggagccctttctggagagatttccgcaaggatttgcagttgtttggccggctgtggctgtgtttctaggtttgctgattatcactgaaggagcggttgcttatcgttctgcgcatgtgagaacatcaccggcacttgtcgtaagcagccgcggtttgccgatcggacagcagctggcaaaccgggtttggcttttgccgctgttccttctcgtgcccggtaatggtttagaatcgcaccttagctggtggcccgtgtttacggttcccggcggctcattccattttctatggattccttactttgtcggatttggacaaagggtacagggatcgctgcctgaaacgagtataaggatcacagcgaaacgcgtttgtattctcggtcttgccgtcgcagttctcggtgcagcgagcttactgtggacgccgcttgcgggtgcagcggtctgtaccgctttgttagggcgtatttttctgtccataaagcaaagagtgaatgataacgcggctccgttttatttctcgaaaagggatcagggcttaatggtgcttgggattatccccaatacgccggctgaggatctggaattgaaaatcggggaaatcataacgaaagtcaatggcataccggttaagaacgtttctgatttctatgaagcgcttcagcataaccgtgcatatgtaaagcttgaaattatcggtttgaatggagaaattcgttttgaccagcgagcttcttatgaaggagaacatcatgaattgggcatcctcttcgtaaaggatgaccgtgaagacgaagcagtcgcttcgggatcataaaaggcagcccggcaccgcaggatgatgcgatgccgggctgttttgtgttacgctgagtttttttctatccgtgccgtttcatcagatttgatgcccaatgaaacaaaaacgccgatgatggatacagcaaagagaatcataaatagggtgtgatatcccgaaatcaggccaattaaggctgatgaaatgatgcttccgaaataacggaaggtcgagaaaatcccagatgccactcctgacataccggggtctactgtggcaagggatgaaacctgcatgctggtcagaccgactccggaagcgagcccgccaaggataagagagagcatgaggaacaagacagaatgcgagctgcttaacagcaaaaataatagattcgcaccagccatcatggcaaatgaaagaaaaatgatttttttggctccccatttgtgatggagctgcgcgcccacccagttgctggctgacatgaagatcgaaaatacagaaagcgccatcccgctgttagatgtattaagcccaaattggttcgtcataaataacggcataatcaataagacggcatacatcatcaaattgcttaacaagactgatagattcgcatttgtaaaggttgagcttttaaacagtgcaaagtcaatgatggggtgctgggtacgtttttctcttctgaaaaaaagcggaacaaaaagaagtatcaatacactgtatacagtatatccccatggagcctcatttttcgtcagcaggataatggaaacgatgctgcctgcaagcaagagagagccgatgatatccagcggcgcgtcagatttattttctttatattgaggaaacatcgttaatgccgtaaataaagcaatggcgaggaacgggatgttgacccaaaaaatcgaatgccagctgaagctgtcaatcagtatagagccgataaaaggcccgagtgctgcaccaagtcccgcgcccagtccgaaaaatccaaacactttcggtaggcgtttttcagaaacaacatgccggataatggcaatgctgtttggcgtaagcaatgccccgccgacagcctgcaatgcccgaaagacaattaacaggagcagactcggtgaaagggcgcagcctagagatgcgattagaaaaaggccgactccccataagtacattgttttattgccgtacatgtcaccgagctttcctgcaatcggctgtgtgactgccatcacgattaaataaacggtaaccacccaagtgatgcttgcgatggactcgttatacgtatgggaaatagatgagagcgcgaccgcgatcatcgttgagttaatgggaaccagaatggcccccaataatagcgagacgatcagcgcccattcttttcttgagctcattgggatcctcctttttattatgccaaggagttaatcagcagaaattcctttgacaaatagagctgtgctatgctccagcattttttcctggggcattgatatgacccggtctcctaagtggagacggtgaatgaaataaccgaagataatcgacatgaacacgtcggcatgttccgcttcatttcctgtctgaataacccctttctcacccatcgttttgagataatcaaccaatagctgtttcatagattggggatattcagtgacgtggttaatgacatcctgaaacatggccggttcacgaaagctgattttaatgatatcttttctatgttcgagctcctccaagagacaggttccgatatgaagcaggtctttgtacaaatccccttctgtttgttccaaaatgctgcctctgtttgaagaatgctgagaaagcaaagcctcaactagtccttgtttgtttttaaagttcctgaaaatcgtcgcttcacttacatttgctttttctgcaatttcttttgtagtcgttgcgcgatatccttttttgacgagcagctgcatggcagcatcaaggattctcttgtttgtcggtctcaatacgtttcacctcacgaatatactggcaggacaagtatacacccgccccgcttgtataagaaagagggggacgcatcaggaccggctgacaactgtgattttgccgctgcttccgtcaacagtgatgatgtcaccgtctcgcagtctttcggttgccgtgcgtgtgccgagaacggctggaatgccgtattcacgggcaataatcgcagcgtgagacaaaatgccgcctgtgtctgtaataatcgctttggcgtcttgaaacaggctggtccatagcggtgtggtcatcttgcaaacgagtacgtctccaggcgcgaattgagaaaattcattggcgtcccgaatgattttcaccggacctgtcgcaatgccgcttgatgccgcaatgccaaaaatatgattctctgtgtttttttcatcctctatcacagcgccgacaatttcttcagctgctttgagctgttcttttgtcggggtgccgaggtaggccggggcttgggccagctcatactcatgaaaaatctgtctgcgtttttcagccttttcttgcagggatacagggtgaagaagcgcttgttccacttcgtcgtcatataagaaccaaaggtcctcccgatcttgaatgacaccgttttccgccagcaattcacctatcttcagcagaaagattctcgccttggcatccagcatggcgtcaatataaaagtggtgatcatcttttatatttgcagagttcagtgtccattgataatagcggtcaaattcggtgcgtaaaccgggatcttctatgctttccaagaattcattgtataatttctctcgtttttcttttgttttctgaaattcattgtcaaaatgatagccattacggacataattttgaatattggccagagcgaaatacggattttccacccagatttgttcaatcagatcatgacttttaacagatctccatccgtattcttgcaagaattcatggacgttcttcaggaagtgtcttccctcatctgtttgttccaatttctcctggagctgttcaggcttgttgttttcaaaaatggccagaaggttcgggttctcctgaacttccacagaaaatagccataagcaacggtccgtttccagtgatttgttcatttttcctgtcagcatctcgtaaaaatgagcgttttcggactctccttgaatgtcctgatacatcgcttgcagtttgtttgttaaaaggatttgcgggaaaacgatattaaagtgctcttcataagccgtgagataaaaggcctttagtttttgaaaagcttccagtgcgctttctgcggtatgctcagtttgtgcgagctggtccagtgtccggtaaaaagggaggtatgtgtgattgatgatgtcatacatatgctccgataaaatcgggaaaagctctttgccgcagtcttcagaaggaggctgctgtccgccttggtttttggaataaatatgtccgcgataaagttttacttcatcaacaactacaccaatcggaaacttttgcatgctcttcttcaagccatattccaatgccggcacgatgaaggatgaaaataacggactcaccggaccttcaatattagactccatgttaagccagaaatcattcatatcagtgtcggtaatcatgaagctgcgtttttcttctgccgcttttttgtcctgatcaatggttgtaatcgggcgagcttgcagaaggtatatttgatgatcagcaattccaaattctatatcaacaggatatccgtacaggtcttcggttttttttgtgatttcagccaattcaatcacttgttcatctgtaaggcaaaaacggctgcgcatgtcttcactcgtttctttttcagcaattccttctgccgcagactccatgtagatttcctttgcacctatttctttctgaatctcaaacgaagatttattaacaatgaacgtgtctggggtaacatttcctgaaacaacagcttcacccaacccgtagctggcgctgattaaaagctctctatcatcatgggtaacagggttgcggctgaagataacacctgacatttctgaatcgatcagcccctgaacgactattcccattaacggctctgcgatttgattgttcatttttttcttatagctgctgacccgcccagaaaaaaatgaggcccagcattctttcactttagccagaaactcttcctctgttttgatatttaagtaggtttcatattgacccgcgaatgaggcgccttctaaatcttccgaagcagacgaagaacgcacggctacggatcgatatgattctctaagcttataaaaggaactagtcagctcatctttcagctcatccgaaaatgttccggaaatgatcccgccttcgacgttttcactagtctcttgaagctggttgtcctccataaaacgtgcgagcgcattcgtttgaataataaacccgtccggaacaggaagaccgtgtttggtcaatttaatcaaattcattccttttgctccagccagctggctggactcttctgcctggcgaaataaaacagaatacatatttgaaacccctcttttcttcattcattttgtttttctctctagtctttttattgcggagcctgtgtttaaaaaatgatagtaaacactatcatttaattgtaggttttcaggaaaatgctgtcaaacgcagaaagtcctaaataaaatgaatagttaagttggttatattatcctgaaaaatgcggccgtactggtactgtatgcctattttcttttattctcggaatctggcggcggacttgatgatgtaataaaaaaagtgccgctgattagaacagcggcaccatggaataagttttgaccggcaccaaaatgcaaatatggtgattgattttggctgaaaaggggtatggtgtaagtagagggagcgaatgcacgattgtccgattcttcattttttactataatcagatcagatgaagaatccctgaggagggtttttgttgattacaaaagccgtttttgcattgtttttcccttttatgcttgttgttctatttactagagtcacctttaatcattatgtggcgatcgctttaacagctgcattgctgtttgcctcttatttaaaaggctatacagaaacgtattttattgtaggattggatgttgtgtctcttgtggctggcggactgtatatggccaaaaaagctgcagagaaaaaagaagaataaatcggacataatgaatataaagactgaatacctgcttttacgttttaaaagcaggttttttatacacaaaaacagctggaaataaaaaaccaccgaactttagttcgtatttttagtgattttgctttccattgtgttactatatctataggaagatttcgttaaagaaacggaggcttatttttgtgaaagatcgctttgagttagtctcgaaatatcagccccagggagatcagccgaaagccattgaaaagcttgtgaaaggaattcaggagggcaagaagcatcagactctgctgggtgcaacaggaactgggaaaacatttacggtgtccaatttgattaaagaagtcaataagccgactctcgtgattgcccataacaaaacccttgctggacagctttacagtgagttcaaggaattttttccgaacaatgctgtcgagtattttgtcagctactatgattattatcagccggaggcgtatgtgcctcaaacggatacatttatagagaaagacgctagtattaatgatgaaattgataaactgagacactccgccacatcagctttgtttgagcgcagagatgtcattattattgcgagtgtgtcttgtatatacggcctcggttcgcctgaggaataccgggaaatggtcgtgtcactgcggactgaaatggaaattgagcgcaacgagctgctcagaaaacttgtagacatccaatatgcccgcaacgatatcgactttcagcgcggtacatttcgtgtgcgcggggatgtagtggaaatctttccggcatcccgtgatgagcattgtgtcagagttgaatttttcggtgacgaaatcgaacggattcgggaagtagatgcgctgacaggagaaattctcggcgaccgagatcatgttgcgattttcccggcatcccacttcgtaacgcgggccgagaaaatggagaaggcgattcaaaatatcgagaaggagcttgaggagcagctgaaggtcatgcatgaaaacggaaagctccttgaagcgcagcgtttagagcagcggacaagatatgatcttgaaatgatgcgtgaaatgggtttctgctccggcatcgagaactattcaagacatttgactctgcggcctccaggttcaacgccgtatacgcttcttgattatttcccagacgattttatgatcgtggtggatgagtcgcatgtgacaattcctcaggtgcgcggcatgtttaacggagaccaggcgcggaaacaggtgctcgtggatcacggcttccggcttccatcagcgcttgataaccgtccgcttcgttttgaggaatttgaaaagcatatgcacaatatcgtgtatgtatcagcaacaccagggccgtacgagattgaacatacagatgaaatggtcgaacagatcattcgtccgacggggcttcttgacccgcttattgacgtccgtccaatcgaaggtcagattgacgacttgatcggcgaaattcaagcaagaatcgagcggaatgaacgggtgcttgtgacaactttgacgaagaagatgtcagaggatctgaccgattatttaaaggaaatcggcattaaagtaaactatctgcattctgagatcaagacgcttgaacggattgaaattatccgcgacctgcgccttggcaagtacgatgtgcttgtcggcatcaacctgctgagggaaggtttggacattcccgaagtatcccttgttgcgattttggatgcggataaggaaggtttccttcgttcggagcggtcgctgatccagaccatcggacgggcagcgagaaatgcggaaggccgcgtcattatgtacgccgataaaataacgaagtctatggaaattgcgattaatgaaacaaaacgccgccgcgagcagcaggagcggtttaacgaagagcacggcattacgccgaaaacgataaataaagaaattcgcgatgtcattcgtgccacagtagcagctgaggataaagcggaatacaaaacaaaagccgcgccgaagctgtcgaaaatgacgaagaaagaacgccagaaagtcgttgaacagatggagcatgaaatgaaggaagccgccaaggcgcttgactttgagagagccgcggagcttcgcgatttacttttagagctaaaagcggaaggatgatgaacaaatggctatggatcggatagaggtgaagggagccagggcgcataacctgaaaaatatagatgtaacgattccgagagatcagcttgtcgttgtcacgggtttgtccggatcaggtaaatcctcccttgcctttgacacgatatatgctgaaggacagagacggtatgtcgagtcgctgtctgcctatgcccgccagtttttagggcaaatggataagccggatgtggatgcaattgaggggctctctcccgccatcagcattgatcagaaaacaacgagccgcaatccgaggtctactgtcggtacggtaactgagatttatgattatctgcgtcttttatatgcgagagtagggaagcctcattgtccggaacacggaattgagattacatcccagaccatcgagcaaatggtggacagaattctggaatacccggaacggacgaagcttcaggtgctggcgccgattgtctcgggccgaaaaggcgctcatgtcaaagtgcttgaacagattaggaaacaaggctatgtcagagtcagaattgacggcgagatggctgagctttccgacgatatcgaattagaaaagaacaagaagcattccattgaggtagtcattgaccggattgtcgtgaaagaaggcgtggcagcccggctgtcagattcattggaaacggcgcttcgtttaggtgaaggacgggttatgatcgatgtcatcggtgaggaagagctgatgttcagcgagcatcatgcctgtccgcactgcggattttcaattggtgagcttgagccgcgtctgttttcgtttaacagtccgttcggggcgtgtccgacgtgtgacggtctcggaatgaagcttgaagtggatgccgatcttgtcatccccaatcaagatttgtcattgaaggagaatgcggtcgccccttggacaccgatcagctcacaatattatcctcagctgcttgaggcagtctgcacccactacgggattgatatggatgtgccggtcaaagatttgccgaagcatcaactggataaagtgctgtacggcagcggggatgacctgatttatttccgatatgaaaatgattttggacaaatccgcgaaggtgaaattcaatttgaaggcgtattgcgcaacattgaaagacgctataaggagacaggctccgatttcatacgtgagcaaatggagcagtatatgtctcagaagtcttgtccgacgtgcaaaggctatcggttaaagaaagaggcgcttgccgtactgattgacggccgccacattgggaaaattaccgagctgtctgtcgccgacgcacttgccttctttaaagatcttaccctttctgagaaggatatgcagatcgccaatttgattttgcgcgaaattgtggagcgcttaagctttctggacaaagtcggcctcgattacctgacattgagcagggcagcgggtacattgtccggaggagaggcgcagcgcatcaggctggcgactcaaattggctcgcgtttatccggtgtgctttatattttagatgagccgtctatcggtctgcatcagcgtgataacgaccgcttgatcagcgctctgaaaaatatgagagacctcgggaacacgctgattgttgtcgaacatgatgaggacacgatgatggcagcagattatttaatagatattggaccgggagccggcattcacggcggacaggtgatatctgcgggtacgccggaagaagtgatggaagatccaaattcattaacgggcagctatttatcagggaaaaagtttatcccattgcctcctgaaagaagaaagccggacggacgttacattgaaattaaaggtgcatcagaaaacaacctgaaaaaagtgaatgccaagttcccgcttgggacgtttacagcagttacaggtgtttccggttcaggaaagagtacactcgttaatgaaattttgcataaggcgctggcgcaaaagcttcataaagcgaaagcgaagcccggcagccataaagagattaaaggtttggatcatttagataaagtcattgacattgaccaggcgccaatcggaagaacgccgagatccaaccctgcgacatacaccggtgtatttgatgacattcgtgatgtattcgcgcagacaaatgaagcgaaggtccgcggctataaaaaaggccgtttcagcttcaacgtgaagggcggacgatgtgaagcctgccgcggagacgggattattaaaattgaaatgcacttccttcctgacgtatacgttccatgcgaggtgtgtcacggcaaacgctataaccgtgaaacgcttgaagtgacgtacaaaggaaaaagcatctctgatgtgcttgatatgacggttgaagatgctctttctttctttgaaaatatcccgaaaatcaaacgcaagctccaaaccctttatgatgttggtttaggttatattacgctcggccagccggcgacgaccttgtcaggcggagaagcgcagcgcgtgaagctcgcgtcagagctgcacaaacgctcaaccggacgtacgctctacattttagatgagccgacgacaggtttgcatgtcgacgatatcgccaggcttcttgtcgtgctgcaacggttggtagacaacggagacactgtactggttattgagcacaatcttgatatcattaagacggccgattacattgtggatttgggcccggaaggcggagccggaggcggaaccattgtcgcgtctggaacgcctgaggaaatcactgaagttgaagaatcgtatacaggccgttatttaaagcctgttatcgaacgtgacaaaacacgcatgaaatcgctcttgaaagcaaaagaaacagctacatcttaaaaccctctgttaagaggggacagcttgtcggcaagtccatccttgggcttagcaggcaagctttttctttacggcataataggtttagaagtgaacttactgttcaagcaggaaacacaggtacacaacaagcagaagatcttggtgcaattaaagatgaaatggatgcgcttattgaggaagttgatggcatttcaaatcgtactgaattcaacggcaaaaagttattagatggtactgaaactgatggtttcactttccaaattggagcaaatgctggccagcagcttacagttaacattgacagcatgtcatcaactgctttaggagtaaacgcacttaatgtaacagattttgctaatactccttttgatacacaacttgaaagtattgatactgcaatcaacaatgtctcaaaccaacgtgctaaacttggtgcggtacaaaaccgtctagagcacacaatcaacaaccttggtgcttcttctgaaaacctgacagctgctgagtcccgtatccgtgacgttgacatggcgaaagaaatgagcgagttcacaaagaacaacattccttctcaagcttctcaagcgatgcttgctcaagcaaaccaacagccgcaaaacgtgcttcaattgttacgttaattttgaacggctatctctttctgatagttacagcttgccgacagagtccattaactggatgtgccggcaggctttttttgttacaatcattttgtgacagccagggaatcacttgttttttcaaaacaaaaaaggcaagatattgtcatctaacctttagctttgtttcagttataatgaatgatatgttttccgcaattacaaagtcttcttatacagctgcttacttacactcattaaatcttgaacaatatgtgtgttgctgctgtcgagcagcacttttatatattggatatcgtgagagatcgggaagggtccgtgaatctgctcaagctcggtgatcatttcacgattcattcttttttgttcctgaatcagctttaacactgattcttgtgttactgtatagtcactgggatctttctccattgcttgtccagcctccttggttgccgtaagctttttacatattgtaatcggtatagccggaagattctacttctaaaactttttaaaatccaatttccgtaaatcggagcatgtctaaagaatgaatttgaaacctgaagagattttaaacgtataaataagtaaaacgtccctgatcttttgtcatggacaattcacaataggagtgtggaatgaattgaaccgtaatcaagctattattgcatcactttgttatttcagtgtgttcattgcgccaatcattgtgccgattgtcgcatattttgttgtaaatgagaaagaaacaaaacgccatgcgatacgctctcttatttctcacattgttccgtttgtcggctggctgttcctttttattgctttacttggcggagccgttgcgattgatggagacagcttgcttcctgtatttgtaatcatcgggggagcggttatttatttcttagttgtcattggcattatcatttggaatgtgattcagggcattaaggtcctgcgtgcagcataagtagacaatggggaggagatcgtaatgaagcaagaaaaggaacgaatccttaagcttgttgaggaaggaaagcttacagcacaagaagctttgacactgattgaaaagcttgacagcgactacaaggaaaaagaagagaaaatcacagcgctctcagttcacgttcatgacgaggaagagccatttacaacggcaaaaaaagaaagcggcaaaccgtctttaggagccaagctgtttgactggattgattctgctgtgaaaaaggtcaaggaagttgaccttgatttaaactttggccatgcgtatgatgttcagcacatttttcaatttaaagatactgacttttccagtgttgagctgcaaattgccaatggcagcgtaaatatcgtcccttgggaagatgacgatatcagagcggaatgccaggcgaaggtatatcgcgctgacagccaggatgcggcgagacacgcatttcttcagcatattgaatgtgaaatcaaaggtaataagttttttatccgtactgagaaaaagacgatgaaaacgaatgtcactttgtatattcctcagaaggagtatgataagattcgggtgaagctgtttaacggtccagtcagaggggaacatttacatgtaaaagagttctcagcgaaaacgacaaacggcgtgctgtcgttctcgtatttaacagccgaaaaagccatagctgaaacggccaacgggcaaattaagctcgcaagccacagctgcggtacgatagaagcggaaaccattaacggattgatcgatctccgagggaaaagcgaatccattgacgttcaaagctttaacggaaatattgcgattaacgtaacagaatcagactgccgctccatttatgcaaaaacaacgactggaaatgtagagcttgcaattccggacgatctcgcagtgaaggcagagctgaaaagcaatcttggtacgctgtcccatgaattaatggatgtagagatgctgaaggaaaaaaatgatacgattcaaaaagaaatgatgttcacttcaaatcaggcacatgatcaaaacatcaccgtcttctcagaatcactaacaggcgccatcaaactaaagtactcacagaggtgatcgaatgaataagctttatcgctcagaaaaaaataagaaaatcgccggtgttatcggaggtctcgcggaatatttcaattgggacgcatcactcctcagagtcataactgtcatcttagccattatgacaagtgtcttgccggttttgctcatttatatcatttggatttttatcgtcccgtcagaaagggatatgaaatgacatggtaaaatgggcagtcagcattttagtcaatgcattgttattaatcgtcattgatggatatattgactccatccatatcagcagcattggggcagcgattatcgccagcctcattttatcgatcttaaacgtgctgattaaaccgcttttaattatatttacactgccggtcaccatggtgacgcttggactcttcttgtttgtgattaacgccatcacgcttatgatgaccgcgtccattatgggtgacagctttcaaatcgacggcttcggcacagcgatatgggcatccgttatcctgtcggtcttccatttgctgattcaaaaaggcattttagagccgcttagaaaaaaataaaaaaagctgcccgcaaaggcagcttttttacatgtggtgctttttttgtttcgtgcgcttctgcggcgaaaacattggcggaagaaggcaaaagctcaatgcggcaaatccaaggcctaggaggctaaaggacatggcagacggcatcattgtgagcaagtaggcagataccatcggacctgctgccatgcctgtatatcggataaagttaaacattccgattgcactccctctgttgtgctcaaattcattagtaatcattgtagagtacaagggaggaataacccccatcgagatgccaaacagtgccagcgtcagagccatgagaacgagagaaacggaatgtgtaacagcaaataaaatgatgctgcaggcggcaatcacattgcttccgataaacaaggtgtgcagcccgatttttgcctgtattcttttaaacagaaacgtacctgcaatcgtgctcagcgccagcggcaaatataacagtcctgctatacccacatctatatggtaatgctctgtcagcaatattgggaggtagacaattactgcaaaataaatgaaaaagagaacaaaacttaaagtcaaaatgacgttccctgttcgatttgtaaatattgatttataatgagcgaacacattgcctttggcttgctgcatagattcagttggagaatctttaggaaaggtgatgctgtttgtcaccagcaaaacgatagagatggccgcaagtatccaaaaaatcccttcgtatccggctgctccgcctatgaatcctcctagaactggagcaatagccggtgcgacagacaggagcatttgatacgttcccattgcactcccgcgttcatttcctgtaaacagctgtccgatcgttgtggcagcaataagaggcagtgctgcggaaccggctgcctgtatcattctgaatatcagaaacaaggtaaagtcagtagtcaccgcacagccgatgctggctgctgccgttgccagaataccggtaatcaagacgatccgagcgcctttaaaatcaatgatcgctcctaatataatttgcattattgctgtcacaatcataaaaactgagactgacaggttcaccatagctgtggaaacatggaatgattctttaatgatcggaagaataggtgaataaatgttctggcttaaagatgcaaaaaatgcactgaagcaaacagtgtataagatcaatactgcctttgattttgtatgagccaaagtgtacaccgcctttttgtttactttacaggtttgtctggagtcccatcggtttgttctgcttcaagtgttgacgtcaactgctctagaaacttcaatacagccttttgttcttcttgtgaaaatgaatcgaggaattggtaaaaagccagctccttttttttatgcagtttctcatgtaagtcgaaaatccgtctgcctttacgggttaatttaaaataaacttcttttttgttatctgtcagctgatagctgttaatgaattcttccttgatcagttttgtgctgattttcgttacattcgctttcgataagttcatttttctggcaattccggcattattaatgggttcatgctggccgatgcagtcaatgacgtgaatgcttgtcatatttttgggaatttcagctacatcctcttctgcggcctccttaaaaaattgctgaagtgaagtgttcgctttttgttcattaaggtgcagcagtctcacgtatatgtcgtatatcatctgttttgtcaaatcagacataggctaccttctttcttaggaataatagtttacgatgaaacaataaaacaaatcgtttactggtgaacaattttattttatcttttcttgttttcgttgtcaattgttggtgtttagactatttgttgatatgtcatgctgaatatgcgtgtaaaaagtgtgtggaaaatgtgatgtttacatttattttcaaatatttgggcacagatcatattgacgtttggaaggaaaagggataaaatgactaatgtttactagtaaacatttatcatgatatgggtattgaaaatgattattaaaatcttaaaaaacatttggaaactttaagtgatgcctgccattcgtcttgttcagttgttctagctattccatcttgtatttgagggtgatgacttaaagcgggataagttttaggggtgaatgagatgaccggaatggtaacggaaagaaggtctgtgcattttattgctgaggcattaacagaaaactgcagagaaatatttgaacggcgcaggcatgttttggtggggatcagcccatttaacagcaggttttcagaggattatatttacagattaattggatgggcgaaagctcaatttaaaagcgtttcagttttacttgcagggcatgaggcggctaatcttctagaagcgcttggaactccgagaggaaaggctgaacgaaaagtaaggaaagaggtatcacgaaacaggagatttgcagaaagagcccttgtggctcatggcggggatccgaaggcgattcatacattttctgattttatagataacaaagcctaccagctgttgagacaagaagttgaacatgcattttttgagcagcctcattttcgacatgcttgtttggacatgtctcgtgaagcgataatcgggcgtgcgcggggcgtcagtttgatgatggaagaagtcagtgaggatatgctgaatttggctgtggaatatgtcatagctgagctgccgttttttatcggagctccggatattttagaggtggaagagacactccttgcttatcatcgtccgtggaagctgggtgagaagatcagtaaccatgaattttctatttgtatgcggccgaatcaagggtatctcattgtacaggaaatggcgcagatgctttctgagaaacggatcacatctgaaggatgatagggggagtaaaacatgagccaatcgattaaattgtttagtgtgctttctgatcaatttcaaaacaatccatatgcttatttttcacaactgcgggaggaagatccggttcattatgaagagtcgatagacagttattttatcagccgctatcatgatgtccgctatatccttcagcatccggatatcttcacgacgaaatcacttgttgagcgtgccgaaccagtcatgcgaggccctgtgctggcccaaatgcatggaaaagaacactctgccaaaagaagaattgtagtgagaagctttatcggtgacgcactggatcatctgtctccattgattaaacaaaatgcagaaaacttgttagcgccttatcttgaaagagggaaaagtgatctcgtcaatgattttggaaagacgtttgcggtgtgcgtcacgatggacatgctcgggctggataaaagagaccatgaaaaaatctctgagtggcacagcggagttgccgattttatcacgagtatctctcaatctcctgaagcgcgggcacattcgttatggtgcagcgaacagctttcccaatacttgatgccggtcattaaagaacgtcgcgtcaatccgggatcagatttaatttcgatcctatgtacttctgaatatgaaggcatggcgctgtcggacaaggatatactcgcactgattcttaatgtgctgttagccgcaacggaaccggctgataagacgctggcactgatgatctaccatttgctcaacaatcctgagcagatgaatgatgttttggctgaccgttcgttagttccgagagccattgcggagacattgcgttataaaccgccggttcagctgattccgcggcagctgtcccaagatacagtggtcggcggtatggaaatcaaaaaagatacgattgttttttgtatgatcggtgcggctaaccgggaccctgaagcatttgaacagcctgacgtgtttaatattcatcgggaagatcttggtatcaagagcgcttttagcggcgccgcccggcatctcgctttcggatccggcattcataactgtgtaggagcagcttttgccaaaaacgaaatcgaaattgtagctaatattgtgctggataagatgcggaatatcagattagaggaagatttttgttatgctgagtccggtctgtatacacgcggacctgtttcacttctcgttgcgtttgacggggcataatagaattccaaaggtctctcccatgcgggtgagactctttttacatatatttgatccacaagttgaaaaacgcagtcactgtttttaaatcatcaattgaaaattcattgaaaagctgtttatattgctcctttgctttctcatgaagctgttcatgtaatgccgccaattttctgccgctatcagttagcgtataaaaaatttcttttttgttgccaggcttttttgtcactgtaatgatattgtgtttcaacaaagcatgaaccgcttttgaaacagcggcttttgagatgtgtaaacgggatgctaagaagctgttgttcacattttggctggtatgtatgcaggaaacaatgtgaagctgggtcaaagtccagtcttttttgaggtgatcgtgatgttgtgaggatatgccaatggatggtatctgcaccttttgccagacgcgtttatccctttttaatgcgaattgttgtatagcttgaaataattcatcatgaatgctgttgtccatcaatttgcctctctgatttaattgttaactggttaactatccttagtttactgggtaatagtggaattttcaagagacagacgtttttttgttctttatgcacaaaaatgaactcataagcttccctgttcagacgcaaaatacatgaaaagggaggtgctttgatgaggaaatacacggttattgcttctatattactgtcttttctttccgttttgtctggcggccatcatgaatcgaaagcttttcctgttgtacagcaggaactatttcaaacgcctcattacatacccttgcttgaaaatcctcctcaaattgatgtgaaagctgaaatgagaagcaatctaatgattgaggctcaagttcgcgataattcgtatcaagcattttccgcctttcttttttataaacaaagtaatgagctgggctacaaaatggtgccgatggacccgacccccggagcggtccgcaagtttttggcacaaattccgaaacgtttgatttggaacagcgagcttgagtattacattgtgatgtcgaatgggaagcagcgggttgagtcggagacgaagaaactgaagcttgaaggataccaggctgaccttgcccatattccggagcttctgatcacagagctggcggttgatacgaagaatataggacgcgcagacggttatgaatttattgagatttttaatacgactgacagaacgattgattttaaagactaccatatccgttaccgctacccaaaagaagggcctgactccgatctgatttggagacctgatgaaaggatcttgataccatccggcgaaacgtttgtcgtctggctgaagcctgccgggcatccagaattgacgtcagcggatttcaatcgttattatcagacacaactaaaagaaggaaaaaatcttgcggtgatagacgagacagagggtatggccaatacgaggccgcgggccgttgtgatatcaacgaatacaggaaaggacatttcggttgcgcattatcggaaacatgcgctgcgccggctgtcatcagtgctttataagtatccactgaacggaacagcagaacttctgaacatttcaatcggggaaaagaatccgtctcccggaaccgtattacaggcacaggtgcccgaccagaaacggaaaatcaagctcgataaagaaaagccggtcattgaggatttgactgaccgcaagcctgtccgccctgctgaaagcattgagctgcgggctgacatacgggaccgaagcctagtgaaaacagtggccttttactaccggacggatgagaacaaaccgtttaagcgaattcttgctgaaaaagaccgcaacgataatctcttccattatattgtgtattcgcctgaattgatcgggaaggatcagctagagtattatgtggcggccggggacgggatcaatgaagcgagaacgccggtcaaaatgattgatattaaacaaacaagcaaggcgcacggtctgcggatgaatattgaaaacagagacacgctgtcgggaactcaatttctcaaagccacgacagaagggcgagctgacagcattaagctatggattgacgggaaaaaacaagtgacagagcccgcgatggaaaaagaagtatattttgcattcgatacgaggaaaacgaacctttattttaaaaacgcggtaacgatggaaggcaaagtgctgaaggtgttcgatgatacaacaaataaataccgcacctattctgttccattgccagagacactgcttcggaaagggaagcagctgcagcgtattacgatacgttcaggttcgaaggtgtctccgtttgatacggctgaaaaccgtgatgacttcttagtcaaaaacgcccgattggtgttatcggatggaacggtgatcagagatcagagggtgtctcctgagaaggaactctttattggcgataatcagcgctcgaataaaagctggcaatttcagttcaatctgcctgacggactatttacatcacagctgctggagtgggatacatcaaagctttctgaaggcgctcaccatattcaagcaagcgacgggaaggaaaatgtcagcctggttgtacgggtagataattcaggacctcacattgagccgaatatcaccgaggggcaaacgtataaaggaaaccttatcctgcaggcggatatgtatgataaatggagcagaattgaggaagcggaggcgtcgttagatggagaaagcattacactcccatatcatacgtcatcttctgaccttttgccgggaaaacattctctaaaagtgacagcaacggatctcgcgggcaataaaacagtgattgagaggatatttaaaaccgaacgagagcatccggaccagccggaggttatagacagcgaagccgacacgcataaggccaagctttctgtacgggtgaaagatccgacgaatgatgccatggatgttggtttttataggggatttcaatatacagcgcgcaatcatgtgaaaatatttaagcacgcgtcactgactgaaccgccgaaaagctttgtgccggaaagggagaccccatttacgaataaagaattggagcgggtatcagctgctgatggaaaaacagtatcgacagaaaacaaagagcttttcccttatcatcgctttgaagtgacggttgatccatcaattgatgagaatgatctggcagaatcagtctggaagggcagttctttgccggggagaaaggtgacgatgtatgcttggaattatcggacaaacgaatggcagcctgttgacagcttcgtcgcgaaggatgacaaaccgtttacgctgaaagcgtctgtgattgccgccgattttgtacgggagtcgaaaatgaatgtgattgtacaggatgaaattcctcctgcgaaggatatgtacacatttgtctggatgtctgatacacagtattacgccgaaagctatccgcatatttttgataaacagaccgaatggataaaagataatcaaaagcagctcaatatcaaatatgtgttccacacgggtgatattgtagatgattccgccgatatcagacagtggaaaaacgctgatcggtcaatgtccgttctggataagagcggaattccttacggcgtgctggccggcaatcacgatgtcggacataaggacggctcctacagggcgtttggcaaatattttggcagcgatcgttttgataaaaaatttcattatggcggttcctataaaaataaccgcggacattatgacctgatttctagcaacggcaatgattatatcatgctgtacatgggatggggcattacggatgaagacatcgcgtggatgaatcaggtgctgaagaagcatcctgaccggatggccattttagcttttcatgagtatttgctggtcagcggaaacagaagcccaatcggagagaaaatattcaaagaaatcgtaaagccgaacccgaatgtcgtgatggtgttgagcgggcattatcatagtgcgatgagaaaaacagatgagctggatgatgatggtgatgggaaaccggatcgtcttgtgcatcaaatgctggccgattatcagggcgggccagaaggcggccaagggtatttgcgtttgcttcaatttgaccaagccaatgacatggtgcacgtatcgacgtactctccgtatgtaaaggataagaactactatgatacggatacctatggcaacaaggatgaattttccctttcgcttgatttgaagccaagaatcaaaaaggtggaaaccgattattttgaatgtaacgtatataccaatgaagagctcggaaaacgggagcaagtgaagagcggggacacagctgaattccgctgggatcatcttgaaccgcagtctgtttattattggtacattatagtggaagacagttttaacggcaaaacgaaatcaccgatctggaagttcaagacgaaaaaagaaacatatcgtccggcaccagaccagtttgattttcgccatgtctccaatccttaaaaagggttggaggctttttttatgaaagacgatccatatagtggacaaatgtataacggtcgcctctgtatacggattttgcatgctcaaaagcagttccgttctgcagatatgttgttcgtttaattaataggacaggcgctcccttttgaataccaagaatattcgcttcttccgtggtggcagcgcttggctcaagctcctgttttgcacgggaaatcggtatgctgttgtacctttcaatatgatcatagatcgacgactgaaaatgcgattcgttcaattcacccgcaagctcaaacggaatatgtgaggactcaatcgccatcggaatatcatttgccagccgcacccgagtgattttatggatagaggaggggtgcccgcagcctaatatagccgcgagctcctcagttgaatcaataagctgataatcaatgagcctgctgcccggtgtcatcccgcggcttttcatatcctcggtaaagcttgtcagcccttgaagtgcttgttccatttttggcttgctgacaaaggtgccccgccctttcaggcgatagagcaagccttcattaactaaattagaaagcgcctggcgaactgtcatccggctgatcccgaattgttcggcatattcgcgctcagaaggaagaggcatatccggctgcagctctccgttcttaatttgggtttttaattgctccataatctgatagtaaatcggaataggcgattgtttattgatattcataagtcagcatgttcctttcaaggtcttaatgacgcggcttcacgatcaatcaaaaccgtaacatcggaatgcaggtgcaaagcagatgcgggaaaatcttcgcttatgtttccttctaacagcttacgaacagcttccgctttgctttttccagaaataagcagcagaatgcgcttgcttgagagtatcgtttgaattcccattgtcagtgcttttttcggcacgctgtctatggagggaaaatatctggcattcgcttggcgggtttgctcatttaatgtcacaacatgagttcgcgacttgaaagacgttcccggttcgttaaagccgatgtgtccgtttcggccgatgccgagaagctgaatgtcagtgtcgccgagggaatcgactagctgttcataccgtctgcattcggcctccaaatcgtctgcatttccattcggaataaaatgccggctaggcttgctgtcgatatgctgaaaaaaacggtcgttcatatagaagtgatagctgttcgggtcatcgcttgaaagtccggcgtactcatccaaattaactgtagtgatgttttgaaatgagagattctcagtttggtgcaggcggatcagctggcgatacgtgccttccggtgtgccgcccgtcgctaaaccgagaacagcatcaggtttttctttgattgtatctgccgttattctggctgctatttggcttagctcttcatacgtttgacattccattactttcatatctggtcagcctccttggatataaatgcaatgtttccgcggcaaatggtgagaatcacctcgcaatcactgctgacaatcaccaaatctgcatcttttcccacagtcacactgccttttcggtcaaagatgcccagctgtttggccgcgttttcagaagttatattagctatatccgtccaagagcaatttgtaaactcacgcatatgccgtgcgccttcgttcattttgaggatcgaaccggcaagggttccgtctgaaagaagtgctgttcgtcctcttaccgtcacactttggccgccgaactcatatacgccgtctttcagtccttttgccctcatggaatcggtaattaaaatgagcttgctgctgcctttcgccaaaaaagcaagctttgcagctaaaggatgggagtgaatgccatcggcgataagctctgtcacaaacccatcatgggccagcgccgttccgatcactccgggctctcggtgatgaaacgggctcatcgcgttgtacagatgagtcatatggctcgcccctgcttttgcggcatccgacagcaatgcggaatcggcatccgtgtgccccatggatgcgataatcgattcgtctttcaaatggcggatcagttcaaaatgctgatcctcctccggcgcaagtgtaacaattttgatcagtccgcccgcctcctgctgccactttttgaaaagctcaacatccgaaggcctaatccactcctttggctgcgctccggctcttttaggcgaaacaaaggggccctctaaatgaatgccgagcagttctgcacctaataaagaggactcttcagccgctttccactctcttgcgttcaccaaagcttgagaaatgttcccatgctcttgggtaatcgttgtggctaaaaagctcgtcgtgccttcttcgggcagtcttgacgacatgatgtcgagcgtggaaaagctagcatccattgtatctgcgccatagccgccgtggatatgaatgtcaatcatgccgggaagcaaaacggaatccgcaggtgcttgaatctcttttgaatatggctccttgggccgttctgttgaaactgtgctgatttttccgtcattgattccgacatagccgtttttgattacttcattttctgtcacgatcgcaatgtctttgataagaagactctctgccatagatgatccgcctttctggaatttgaatacctttattttactctttttcagactagtgatctagaccagctgaggtgttttccccccttttataaaatctgttttaggttcaagcccgaaagtgataaaatgaaagtattgtgagcaagctcggggcagcccggaacaggaggaacatatcgtggcaaaggttcgcacaaaagacgtaatggaacagttcaatttggaattaatcagcggagaagaaggaattaaccgcccgattacaatgagtgacctatcaagaccaggtattgaaattgccggatattttacatattacccgagggagcgcgtgcagcttctcggaaaaacagagctttctttctttgaacagcttcctgaagaggagaaaaagcagcgaatggattctctgtgcactgatgtaacaccagctattattctttctagagatatgcccatcccgcaggagctgattgacgcctccgagaaaaatggggtgcctgtcctcagatcgccgctgaaaacgacaagactgtcaagccgtttaaccaacttccttgagagcaggctggcgcctaccacagcaattcatggcgttcttgtcgatatatatggtgtcggcgtgctgatcacaggaaaaagcggcgtcggaaaaagcgaaacagcgctagagcttgtgaaaagagggcatcgccttgttgccgatgattgcgttgaaatacggcaggaggatcaggatactcttgtgggaaacgctccggaattaattgagcaccttcttgagatcaggggccttggcattatcaatgtgatgacgctatttggcgctggcgcggtcagaagcaataaacgaatcacgattgtcatgaatcttgaactctgggagcagggcaagcaatacgaccggctcggacttgaggaagagaccatgaaaatcattgatacagaaattacaaaactgacgattcccgtccgcccaggccgaaatcttgcagtcatcatcgaagtggcagcaatgaacttcagattgaagcggatggggctgaatgccgctgaacaatttaccaacaagctggcggacgtcattgaagacggtgaacaagaagaataggagttggcgttaaatgaatgaagcgatagaaccactcaatccgatagcatttcagctggggccgttagccgtccactggtacggaatcattatcggtctcggcgctttgctcgggctgtggatagcgatgagggaaagtgaaaaacgggggctgcagaaagatacgtttattgatcttgtcctgtttgccattccaattgcgattatttgcgcacgaatttattatgttgcctttgaatgggactattatgcggcacatccgggagaaatcattaagatttggaagggcggcattgccattcatggcggattaatcggcgccattttaacgggttatgtgttttcgagagtgaaaaacctttcgttctggaagcttgcggatattgccgcgcccagcattttgctcggccaggcgatcggccgctgggggaacttcatgaatcaggaagcgcacggcgaggctgtcagcagagcctttttagaaaacctgcacctgcctgaatttatcatcaatcaaatgtatatcaatgggcaatattatcatcctacttttttatatgaatcactatggagctttgtcggcgtcattgttttactgctgctgcgcagagcgaatttgcgtagaggcgagatgttcttgatctatatcatttggtattcaatcggaagatactttattgaaggaatgcggactgacagcttaatgctgactgattcacttcgcatcgctcaggtgatttcaatcgtattgattgttttggctgtggcagccatcatcttcagacgcgtcaagggatactcgaaggagcggtacgcggagtagacgtcaacaaagggggatgagggatgaagaagatctttctggccggtcttgcagcaggttttcaaacaacatggacgctgggtaaagtgattttcccggtaacgctattggtcactttgctccagcatacccctgtcatggattggcttgtacggctgatcacaccggtaatgggtctcttcgggctttctggtgaagcggccattccgcttgtactgggaaatatgctgaatctgtatgcgggaattgccgggattttaacattggatttatctgtgaaagaagtctttattttagctgttatgctttctttctgtcataacttgattatcgaatcgacagttgccgcaaaggttggtatcagaattggcgtcatattggccgtgcgcatcggtttggccgctgtgtcagccatcgtcatcaacctcatttggcatggcggaaaggaaacggcgcagtacggttttatcgctgcgaagagcgcggcgccagacagctggctaggaatgttggcagaagcattaacgaaagccggacttggtgttttgcagctggcggcaatagtgatcccgctgatgattatcatccagtttttaagagatttaggctggctttatcggttttccaggtggctgtcgccgtttacgcagctgcttggcatgaataaaaatacgtctatgacgatggtgacgggactgacgattggtctggcctacggagcgggtgtcatgatcaaagctgtcgaggatgacggcgtgagcaagcgggacatgacattggcatttatatttctcgttgcctgccacgcggtcgtggaagatacacttgtctttattccgcttggcataccggtctggccgcttcttttgattcgtgtcaccacagcagttctgctgacaatggctattgcgcacacgtggaaaaaatggaaaccctcagcggttggaaaggaagcaatatgagtgacaaacaagtaacgacgattctgtttgatttagacggaacgcttattaatacgaatgaattaattatcgcgtcctttttgcatacactggagcattattatccgagcaagtataaacgagaagatgtccttgcatttatcgggccgtctctttttgatacgttctcttcgatggaccctgataaatgcgaggatatgatcgctatgtacagagcgtacaatcatgacatgcatgattcactcgtcactgaatatgaaacggtatatgagaccctggatgcattaaaaaaagccggctttacattaggaattgtgacaacaaaattaagagatactgtcaatatgggcctcaagctcacgggaatcggcgaattctttgaaacagttgtcacccttgatgatgtgacgaatgcaaagcctgatcccgagcctgtgctgttagcgctgaaacagctaggaagcgagccggcggaagccattatggtcggtgataattaccatgatgtgctggcagggaaaaacgccggtacaaaaacggcaggagtcgcatggacgattaaagggccggaaatgctggcgaagcatgagccggattttatgcttgagaaaatgagtgatctattacaaatcgttggagtgaagtaatctgtgagaaaaacagatcgtcatccggtctcgggggccaactcactgtggcatgtctatcaaacggtaccttttttaaaggtcgtcaaaaatttcattgtcattcaaattgcgagatatacgccgtttatagggatgaaaaactggctgtaccgcacatttctgcggatgaaggttggaaaacagacatcctttgccctcatggtgatgccagatatcatgtttccggaaaagatctcagtcggaacaaatacaatcatcgggtacaatacgaccattctggcccatgagtatttgattcacgaataccggatcggcaaagttctgatcggggacgaagtgatgattggtgccaacacgaccattctgcccggggtgaaaataggagatggcgcagttgtgtccgccggaacgcttgtccataaggatgtgcctgacggggcatttgtcggcggaaatccgatgaggatcatctatacgaaggaagaaatgcaagaaagattgaaaaagtccgctgaataacatcagcggactttttttgttaaaattgagtgttgttgttttcgtaaatatgctgaacaccaatccatttttgaccgacattagagtagcgtgtatttgtcattctgaccgtgcttgttttgctgtccgtccggaatatcgcttccttcatgtttgtgatggtgcacttgtcgatgatcacatcaacgtggaaggttgaaccaccaagctgtctaatgaacttcccgccattatccgccgtgaaatttttcactgtgaaggtactggctttattgatttggaatatcttatctgacgctttttgagcagaaccgccgtcgatcgtcacttttccttccttcttcaccgttaacgcatcctcaccaacatcttcccatttcacattctgaatgttaacgtttccataagtgtgcacgccatcagctgcaggtgcaccaagcaccacatttttcagggttgctccatcctccacacgaaaaacagggtcttggttttctgactggcttccgtcacctaattctttccctgccacaaaccgctgtcctttcccgtcatatgttgtattttttggtacgataattgtttcgtgcaccactttgtcagctgcaaaaacggttgatggctgaaactggctgaaacccataaccaaaccgaacataaataggatagacacgatttttttcaatgataaatcctccccggatatctttcattttttgcaagagaagcgtcagcgacttgcaccggcttctctcgcatagatcggggcaaggctgaatctgctttaatcataaaaacagacagcctgaaagtaaagacaattttgggtgaaaaatggaaaatgaatcgatcttaccgattgatacaaaaagcatgaatattgtcgtatttgctcagaatagagcatagtgaggcttcaggtgtttacttttgaataaccacggcctggctgcccatttgtttccacgctttttcaaagcttgttctatcggtttttctgtttttatagccatacggatcattgagatacacatatttatcatcatatcccgtaacggcgacgctgtgttcgctgtacgtaatttctatcgttccgtttggcgttttccatgtctgcatgttgtcaactggcgtaaagttggctgtcgtaataacccaaactggattgcctttttcaagctgctgataaacagcggaaatactttttccagtcagatcagacactttgtctcccgcataggttttcgccagctgatagatcggtcgatggtagacaccgagaccagggccattcgccatatccccgacaaatccgtcattcggatcaccctttaatccgctgctgtatgtcaaaggcactgtggcaacctgatttgccagggtattttttgtcacgtcgtatcccgcataattcagcaccatcgcaaggcttgttacttcacagccgttatagagccggggtgcgtccatttgattgtaaaggatgacatccagcggttttgcgcttcccttcagctcctttttgctattcgcagctgagtctgtatcgctatcagaaaccacttttttaaggctgttcaaaaaaggaatatctatatcttttgcatctattttaagtccgaaaaaaataacgcctgaaagaatcatcaggacacatagagttcgcagtgttttcatctttatctccttgttctctatttgatttgtattatagcatgccaaacataaagaatttgagatattacgtacctttaatacattattcatgattttttcataatgaggagaaggatatttgaactaaaaatatccttactgaagttaagcgttgattttcattctttcatctgctaacatattatcatattagcgaactaaaggattcggaattttccttcataagataacagcggaggtgctcgggttgatgtttatgtttgaaaaaccgcacggcatgagagatacactgcccggtttatacgaaacgaaaaaaaaggtgagacgatcgttaaccgatttgattgataaatggggatatcaatttatggaaacgccgacactggagttttacgataccgttggcgtccagtcagcaattgaagagcagcagctgtttaagctacttgatcaggacggcaagacattggtgcttcgcccggatatgacggggccgattgcaagggtggcggcatcgaagcttctgaaacacggtcatccgctaagagtcggctatgcggcaaatgtattcagggctcaggagcgtgaaggcggacgtccggctgagttcgagcaggtcggagtggagttaatcggtgacggcacgacgagcgcggatgcggaggtcattgctttagtcgtcggggcattaaaaaacgctgggctggcatcctttaaaattgcaattggccatgccggcattgcggatgctttgtttgttgaggtgctcggaaacgttgaacgagctgatgtgctgcggaggttcttatatgaaaagaactacgtcggctacagagagcatgtcaagtctctcccgctttcctccattgataaaagcaggctgcttgagctccttgaactgcggggcggtatagaagtatgcggacgtgccgaggaaatcgtcgattctgcgcaaggaaaaagcgtggttgatgagctgaaggcgctgtgggacattcttgaggattacggatgtacggaaaatgtccgcctggatctgaatatggtcagccacatgagctattacacagggattttatttgaagtgtacgccgagaatgtcggttttgtcattggaagcggcggccgttacaacaagctgctgggccattttgattcacctgcaccggcaacaggcttcgggcttcggatcgaccggctgattgaagcccttcatatgaaggacgaaccttgtgaaatagacgctgttattttcagcaaagagcagcgggcgcaagccatcgcttatgcgaatgaagaacgcatgaaagggaacaaagtggttcttcaagatttatcgggaatagaaaatatcgaccagatgacaaaatcttttgcaaacgtcacttattttatcggtgccagaaaggaagagcaaaatgggtaagttactcacaatggcgatgccaaagggccggatatttgaagaagcggcagggctgctgaggcaggcaggctacaggctccctgaggagtttgaagattcgagaaaactgatcatcgatgtgccggaggaaaatcttcggtttatattagcgaagccgatggacgtaaccacgtatgtggagcatggcgtggcagacgtcggaattgcgggcaaggatgtcatgctggaggaggaacgcgatgtgtatgaggtactggatttaaacatcagcaaatgccacttagctgtcgccggacttccgaatacagactggagcggagtagcgccaagaatcgcgacaaagtatccgaatgtggcttccagttatttcagagagcagggagaacaagtcgagattattaagctcaacggttcaattgaactggctccgctcattgggcttgcagatcggatagtggacattgtttccacaggacagacgctgaaagaaaatgggcttgttgaaacggagcacatttgtgacattacctctcgctttattgtcaacccggtaagctatcgcatgaaagacgatgtgattgacgaaatggcatcccgcctatctctcgttgtggaaggagagacggcaaaatgaagatcaaaaccatcagcggagcggaacggctttctctcaagcgttccatcgatgccggaacggaagagcaaagaaagacggtccggtccattattgaagatgttaaagcaaacggtgatcaggcggttcgcagctacacggcgaaatttgactgcatcgaaatagacagcccgctggtcacaaaagaagaatttgaggaggcatacacctcactggattcacgtcttcttcaggtgattaggcaggcaatcgaaaatattagggaatatcacgaaagacagctgcaatcctcctggttttatcacagaaaggacggcacaatgctggggcagaaagtgacggcgctggattccgccggtgtatatgtgccggggggaacggccgcatatccttcatctgttttgatgaatgtgattccggcgctcgtagcgggcgttgaaagaatcgttctcgtcacgcctccgggaaaagacggtctgctgtctcctggagttttggttgctgcagccgagctgggcataaaagacatttacaaaatgggcggcgctcaggcgattgcggcgttagcatacggaacagaaaccattgagccggtggataaaatcacgggtccgggcaacatttatgtcgcgcttgccaaacgagaagtgttcggcgatgtcgatatcgatatgattgccggaccgagtgaaatcgtcgtgctggctgatgaaacagcgattccgagcgaaattgcagccgatctgctgtcacaggcggaacacgataagcttagctcatgtgtgtttgtcacagattccatggcgctggccgagacggtttcagccgaggtgaataagcagctggaaaccttgccgcgaagagaaatagcggaagcttcagtgagagattacggttgtatatatgtggcggaaacaatggtagaagcgattgagactgtcaatacactcgcgccagagcatttagaaatcataacacagtctccggaagctttgcttggcagtatcaaacatgcgggtgcaattttcttaggcagatacagccctgagcctgtcggtgattattttgccggaccgaaccatgtgcttccgacaaacggaacagccagattttcaagtccattaaacgtaactgattttcaaaagaaatcgagcattatttcttacagtcaatcagcctttgaagaacatgccgaaagcatcgcggcttttgccagactggaagggttagaagcccatgccagatcaattgaagcgagagaacggaggatttctaaatgagaaaagcggaacgcgtcaggaaaacaaacgaaacagatattgagctggcatttacaatagacggcggaggacaagcggatattaaaacagatgtgccgtttatgacacatatgttggatttattcacgaaacacggccaatttgatctttccattaacgcaaaaggcgatgttgatatagatgatcaccacacgactgaagatatcggcatctgcttagggcaggcgctgctcgaagcgttgggcgataaaaaaggaatcaaacgctacggatcggcgtttgtgccgatggatgaggcacttgctcaagttgtgattgatttaagcaaccggccgcacttagaaatgcgcgctgatttcccggctgctaaagtcggaactttcgatacggagcttgtacatgaatttttgtggaagctggcgctcgaagctcgaatgaacctgcacgtcatcgttcattatggaacaaatacccaccacatgattgaagccgtttttaaagcactgggacgtgcgcttgatgaagcgacaacgatcgatccgcgagttaaaggaataccgtcaacgaaagggatgctgtaaatgatcggcgtgatagattacggaatggggaatttatacagtgtctcaaaggcgcttgaacgtgtcggcgtgccgtattttgtttctgaaaagccggaggagctgaaagaagctgatgctttcattttgccgggagtcggttcatttggagacgcgatggacaatttgggctacacgaagcttgatcaattgattcacgatatggtctcagagggaaggctgcttctcgggatctgcctcggcatgcagcttttatttgaagaaagcgaagaaaacggcaccgcttcaggactcgggctgttaaaaggaaaagcagtcaggctgaaagcagaagatgaaaaaggaaacaagctgaaggttccgcatatgggctggaatcgtctttcttttcataatgaatctccgctgctgactaaaacagaacaaggctacgcttacttcgttcattcctattacattgacgggatggaggagaacgcgcttctggcaagcgccgattatggtgtacgagtgcctgctgtagtcggaaaaagaaacgtcttcggcgcccaatttcatccggaaaaaagcagcacggtcggaatgtctattttaacccaatttacgaaaatggcagcagaacagaaggtgaaaaaatgagtgcttttacattatatccggcaattgatatgagaaacggcaaatgtgttcgccttgttcaaggggattataataaggaaacgatatatggcgattcaccgtacgacatggctgagttatttgagaaagagggtgccgaatggatccatctcgttgatctcgacggggccaaagaagggaaaagagtgaatgaccgccatgtgattgagattgcgcaaaagctgaacctgaaagtcgaaatcggcggtgggatccgttctgaaaatgacgtctatgaatatttatcagcaggagtcgagcgggtgatcctgggaagctcagcagtttctaaccctccgtttgtcaaaaaaatgctgaaacaatatggcgagaaaattgcaatcggactggatgcgagaaacggttttgtttcaacagagggatggcttgaaacatcaacccttaaggcaactgaactgggcaaagagctagccaatgaaggtgcggaagtctttatttttactgacatcgcgacagatggaatgctgtcaggccccaatgttaaaagcacggtcgagcttgctaaggaaacggggaaatcggtgatcgcttccggcggagtcagctccgtcgcggatctcgaagctctcgcccgcaatgaggcggacggcgtctctggagcgatcatcggaaaagcgctgtataccaatcagtttacgctgagtgaggcgcttgaaagggtgaagcgcaaatgatcacaaaacggattatcccatgccttgatgtcaaagaaggacgcgttgtcaaaggaattcaatttctcgaattgaaggatgccggtgacccagttgaactcgccgaagtgtacgaccgggaaggtgcggatgaacttgtttttcttgatatctccgcctcgcacgaaggacgaaagacgatggttgacgttgtggagcaggttgccgcgaagcttgccattccgtttacagtcggcggcggcatcaatcagctcagcgatatgaaaacgatactgcgtgccggagcggacaaagtgtcggtgaacacggcagctgttctccgccctgagctgattacagaaggagccgagtttttcggttctcaatgcatcgtacttgccattgatgccaagtatgacaaagaatctgacacatataaggtctacacgcacggcggcagaaagaaaacagattgggaggtcaccgcgtgggcaaaagaaggcgtcaaacgcggggcaggagaaatattgctgacaagcatggactccgacggtgagaaaaaaggtttcgaccacacgctgacaaagcttgtttccgaagctgtccccgtccctgttatcgcttcgggaggcgcgggaaacgcacagcatatgcttgaggcttttacaaaaggagaagccgacgccgcgctggccgcctcaatttttcattataaagaaacatcgattaaagaagtgaaatcatacttgaaagagtacggggtgaatgtgagatgaaacaggcagatgaactgcgttttaacgaggacggattaattcctgctatcgtgcaggatgcggcaagcaaagaagtgctgacacttgcgtatatgaacaaggaatcgtacgaaaaaacgctggaaacgaaggaaacatggttttacagccgctcacgccaagcgttatggcataaaggagaaacctcagggaacacgcaagccgtcaaaggtatccggtatgactgcgatcaagacgcgctgctcgtactcgtagaaccgtcaggcccggcatgccacactggcagctacagctgttttacaaaggaacaaacagaagaacaggccgcggaccgattcggcatcatgaacgaactggagcgggtgatcgcggaacgccaagcggaaatgcctgaaggagcttacaccacgtacctcttccgtgaaggcgtcgataagattttgaaaaaagtcggagaagaagcatccgaagtcatcatcgccgcgaaaaaccgggatcatgaggaactcaaatgggaagcggcagacctgctgtatcacctgcttgtcctgctcagagaacaatccctgccgctggatgatgtgcttgacgtattgaaaaaacgccattctgagattgaagagtaaagagccggatgatacggctctttttgttttgtgaaaaaagtaataggtatttagatttatattgggtgttatatatgattagttaataaaaggagatcaaaaccgagtctcatttcctatttatccaaattccgccatgatgtaacatgaaaaaggatgaaataatcatctcttaaccaggtcaatagaattatttttgatataaaaatagaatactattctcacaaaacccgtggaggttcgtaatgaaaaagatcatctttatttgcttcagcttattacttgccctgacaggaggatgcagtatgaatgacaatgataaaaacagcacaaatgacaataaaacagaagcggtaaaaccaaaagacatggatcccaaggatctgcctcaagtacctgcgtttcaggacgagaaaacgagagagtacatggtgtcaacaaaagaagaggaaccaggatattatttgctggaatctaagctgaaagggtttaggatgttgtttccggaggatggaaagtatctatcaagaagatcatcgttaaccgggaaaaacaaagaaagtattggatttaatagttatgataaagacaccaatgtaatgtttgatggccatgtaacatattacaaagaagaaagttttgcgaatgaacctaagacaatgctagatattgttagtggaaaaaatgattataaaggcgaatacaaaaaaagcagcaaaaagaaaacggatatttacactgccaagaaaaaagacatctttgacgatattgatagaaaatataattattcatacagttattttggatatgttaagtctacagaggaagataacctaggagtagaatacgcctttacccttggatgcaaaaatgaaaatcaaccatgctccttagatgaagaaaaggctaaaaataaagttgagaaattaattaattctatcacctttttaatagataaaaaggagaaataagatgggaaataaaaatgtatttgagaatgagaacgtaaagttaaggttaattgatttagaatatgactataaacaaaagtttgcctcaactattgcgagtgaagttaagaaagctaagaaggatttcgaagcagatatacgcagaatttataaagaggaaacccaccacgatcttcctgagaatatgaaaattgaaatttacacctccaatgaacttgtaaatcagaatacaagtatacaaagttcgaccagagaatcaggttacgatggaacggcaatccatataatagatgagaaaaaacatattgatcagcttcagattatttcagaaggtagtgccgataataaggattggtcatataacttttttggtctttttttaggaattgatcatagtcagtatgaggctacaaaggagtttactaacaaagcaaagaaagcagcaggtaactctgaggatttaaaaacattcgccttaggacattcacttgcaaataataaccaagttatggtgcaattgattgatggagaatatgatgaagtttatggggtaaatggagctcaagtcaatattgatcaattacttgaaactgatgaaagtttatatagatatgttattaggaaatttagttataaatatgaagatatagattccatcccgccagaaaagttaaaaaaagaaatccaaaaatattatgaagacaaaggcgtaacaacaaacatcactcagcgcatctcaaaagatgacccgctgtatggagtcagcggcaaggccgattttattacattcggtgatgtgaagatggcagatacaaatacaagtgtaaaaggcatccgaaacattatggatggggttcctgacgaagatgtgaggtcaattcaaaaattccttcaaaaatataaggatgactatgaaaaagacggcttgaacggttttataaaggcagccagcgggatagacatagacctgattgaaaaagtgaaaaacacagacggcgctttaaagaaagtaagtgtcctatatgagcattttgatgatgttaagcaaatgtatggccgaataaaagaggaactgccgtcgtttttaggttttcttcataccttgttgagaaacagcggaccggtcgtagatcagttagctgaaaatggttatattgatgaaacgcaaaagaaagtcatcaaaaaagaattaacgaatattaatgcgagtatgcgaggcatagagtcacggtacgaacatttcatagaccatctaaaacatggccaatttatgcaagctttaaaagacgttggtgaaatagtggactatgtaaaatcaattctgtcctcattgaaaacactcgacacagaaacaaaagacgcactaaaacttatcgtcgacggccacagcatcgttcaaatgctcaacgccttgtcaaaggaaaaaggcttcagctataaaggctccgatatttattttacagggaagagtggctcgggagaaacgattcaagtcaatctctcatccgctgtcagaatctatcaaaacggtatgaaaatcgttgaagatatggaagatgcgatttctaagtaccagaaggtttacagtcaggaaatcgatgaagacttcatagacaaaaagcaggcgatcatcacggctattcatcatatggaagaaaacccttcgcattatgccttcgatcttcaattccggcttgcagctggtttcagccacacattcgataaattggagaaaatctcagttcatgaatcattccacacaggtgcgcttcctgcaaatgatggaattgttgctgaattaaaaaaacagacaacagaaaaaagagattttatcaaaaatatccgcgagagtattgaaaagctgtttgaaaaagaagaaatgatttctcagttatttgattttcagtcttaggaggaatatgaagagtgacttccttattttcagaaagtgaaacagaaattgtatcaacgacctatatgtttcttacccaagatgaaatgaaggggaaagcgggcaccctcaatcaaccgatcaacgactttctcagcctgacaaagaaatttgagtcttcattaaaagaggaaatcaaagggcaaaaagggttgattgtaaaaaaaataaaaaaagagcttgagtctaatagcgaaaaacgaaaagctgcccttcagatgataaaagaagaacataccgcaaaagttgatcggtacaaaatgataatagaagacctgcgacagcaggatgtaacattgacttacagaaaaaagaagccagtgaaagatgtctaacacaaaaatctcctattcaaacaatgagtgggagatttttattttgatcacggcaaaaatatactgaaaaagtctttctccattgatatgattgagaaagagtaaaaatcatccttttgctatgacttttcacctttctgaacgctgaaacaggaggaaaatatatgccaaccaagaaacaaaaatctaaaagtaaattgaaacccttttttgccttagtaagacggaccaatccttcttatggaaagctcgcctttgcgcttgccctcagtgtagtaaccacgctggtcagcctgctcattccattattaacgaagcagcttgtcgatggtttttctatgtcaaatctgtcaggcacgcaaatcggtttgatcgcgctggtgtttttcgttcaggcgggtttaagcgcttatgccacctatgcgcttaactataatggacaaaaaatcatttccgggctgcgggagttattatggaagaaattaattaagctgcctgtctcttatttcgatacaaatgcttccggagaaacagtcagccgtgtaacgaacgatacgatggtggtcaaagaattgattacaacccatatcagcggatttattacaggcatcatttctgtcattggatcattgacaatcttgtttattatgaactggaagctgacactgcttgtgttagtggtcgttccgctggccgctcttattttggtgccgattggacggaaaatgttctccatttcacgggaaacgcaagatgaaacggctcgttttacaggcctgcttaatcaaattctcccggaaatcagacttgttaaggcttcaaatgcggaggatgtcgaatatgggcgcgggaagatggggatttcctcattatttaagcttggcgttcgtgaagccaaggttcaatcgcttgtcggcccgcttatttcactcgtgttaatggcagcgcttgtcgcagtgatcggatatggcggcatgcaggtctcatcaggcgagctcacagccggagcgctcgtggcttttattttatatttgtttcaaattattatgccgatgggccagattacaacgtttttcacacagctgcaaaaatcaatcggtgcaacagaacgaatgattgagattttggcagaggaagaggaagatacagtgacaggaaaacaaattgaaaatgcacatctgcctatccagcttgatcgcgtgtcttttggatataagcctgatcagctgatcttaaaagaggtcagcgccgtcattgaagcagggaaagtgacagcgatcgtcggtccgagcggcgggggaaaaacgacgctgtttaagctgcttgaacgcttttattctccgactgcagggaccattcggctgggggacgagccggtcgatacttactcgcttgaatcgtggagggagcatatcgggtatgtatcacaggaaagcccgttaatgtccgggacaatcagagaaaatatttgctacgggttagaacgagatgtgacggatgctgagatcgaaaaagccgcggagatggcatatgcgctcaattttataaaggagctgccgaatcagtttgatacagaagtgggcgaacgcggcattatgctgtcaggcggacaaaggcaaagaatcgcgattgcgagagcgcttctccgtaacccaagcattcttatgctcgatgaagctacctcaagtctcgacagccaatctgaaaaatcagttcagcaggcgctggaggtgctgatggagggccgcacaacgattgttatcgctcaccgcctatctaccgttgtagatgcggaccagcttttgtttgttgaaaaaggggaaattaccggtcgtggaacacaccatgagttaatggcttcccatggcctttaccgggattttgctgaacagcagctgaaaatgaatgcggacttagaaaacaaagccgggtaaattttggtcgaatcagccaataaaaaagaggagggattttcccaatccttccttttgaactattgaggggcttacgatttatggtatactactgacggtaatattgtataaaacggagggtagttgtgggaaaacacacttctgaacataaaaatcacgcacaaattgtccagctgcttcaagatggacaatatttttttcataaaggcttgaaagcgtataaagagcgcaatctaaaacgggcaagcaaactgattcagcgcgcggttcatttggagccggaggattcagagatgctttcacagcttgcggtcatttattcggaaatgggccagtatcaagagtcgaacgatcttcttgactatatcatggcaaatctggaggccgaaatgccggagtgccattactttaaagcgaataactttgcccatctggggctcttccaggaagcttataaagaagcggccgcttattctgatgcggacccggatggtgaattcgccgaagaaaacgatagtctgcttgatttgctcgatttaggagacgacggcattgaggattcgttgtatgatcaggatgaactgctggtgaaacaggatcgggcaaagtcattgctggaaagcggccagcttgctgaagcggttgcggcgcttgaggaaatcacaactgaatatccggagctttggtcagcatacaacaatctcgcgcttgcctatttctattcaggaaacgttgtaaaagcgaagcaaaccgcttatgaagtgctttctcataatgaaggaaatcttcacgccttatgcaatcttctcgttttctactattatgaaagagaagacgaaaaagtggcggaattgagtgatcagctctccaatgtctatccgatgctattggagcagcgttataaattgggtgctactttggcgcttgtcggccgctacgagatcggatataaatggctcaaatcattatataaaaccggctttgagggtgacgacaccttcttttactggctttcctgctctgcttattttacgggacataccgactttgccgagacgatctggagaaaagtcgagtcgcaatatcccggcgaagaccgcccggcgccttggattgagcggagggaagctcttccttcatctgtggagcagcgactcgcagcctattatatcagcagcacaaagggagaaacagagcatcttgaagcggtgatacgctcaaagagaattaccgctccttttgaaactcattttgtaaagctgcttctgaatggagattctgcggctgctgacgtttcagaggatgcacttttcgcttatcaaacggtcaaactattagagcaagctgaaaaagaagagatgaaaacagaagtcatgagctgctgggtttttcatgtcatccagcaaattcgtgcagctgctccgttgaagaatgagaaaggctgggcagcagccatctgttatatttggaaagaagcccatggcaagcaagacacgaaaaaagacacagcggcccgattcggcatctctccggcaactttgacgaaatatatgaaatatattgatgatattctagaatagtaaattttaaagagttgatttatttaatcgactctttttttgttagatagattatattaagaaaataatatcgacagtttttttacacgcttaagaaaaatgacaaatgatgtgtgacttgacatctgtttgaaacataaatgtaataaaatttatcgctaatttgtcgaaacttgatggtataatgattctcgtacataaggaattagtgttttttacatatgatgtgaaataaacgctatacaaccagaataagagatgcacagaataattaaccataaacaaccatcattcctcgtagagtatgaggaacgaaacttgatgttcaaaatacgattccaaatgaggacaggttcacagtaaaagggaggatataaaaagtgagaaagagtttaattacacttggtttggcttccgtcatcgggacaagcagttttttgatcccatttacaagtaaaactgcatcggcggaaacattagatgaaaagaaacaaaaaatcgaaagcaagcaatctgaggttgcttccagcattgaagcgaaggaaaaagaattaaccgagcttcaggaaaatcaatcaaagattgaaaaagaactgaaagacattaacgataaggcgcttgatacaagcaacaagattgaagataaaaaagaagaaaacgataaaacaaaagaagaaatcaaaaaactgaaaaaagagattaaagaaactgaagcacgcatcgaaaaacgcaatgaaatcctgaaaaaacgcgttcgttctttacaggaaagcggcggatctcaaggatacatagatgttcttttaggatcaacaagctttggtgactttatctctcgtgcgactgcggtttcatctattgtggacgcagacaaagatttaatcaaacagcaagagcaggataaagcgaagctcgaagattctgaagcggatttgaatgacaagctgaaagaagttcaagctgccttggctaaattagaaacaatgcaaaaagaccttgataaacagcttaatgaaaaagacaagcttttcgacgaagcaaaagcaagccaaaagaaaacggctaaagcgatttctgaattaaaatcagaggcgtctgaacttgcaaatcaaaaagcaaatactgaagctgaacaagcacgcatcaaaaaagaacaagaagcagcggctgctttgatcaaaaagcaggaagaagcacaaaaagcatctgatgaaacacaaacagatgacagtcaaacggcgacaactgaatcatcaaaagcaagctcatctgatgattcttcagacaattcttcagacaattcttctaacggttcatcaaacagttcgtcaaacggctcatcttctaagaagagcagcggctcaaacagcaattcaggcggcactgttatcagcaactctggcggaattgaaggcgcgatcagcgttggttcaagcattgtaggacaatctccgtacaagtttggcggcggacgcactcagtctgatatcaacaaccgtatttttgactgctcatcattcgtacgctgggcatacgcttctgcaggtgttaaccttggacctgtaggcggaacaacaactgatacgttagttggcagaggacaagctgtcagcgcgtctgaaatgaaacgcggagaccttgtgttctttgacacttacaaaacaaatggacacgtaggaatctacttaggaaacggtactttcctaaacgacaatacatctcatggcgtatctgttgactctatgagcaatccttactggaaagcagcatttaaaggtgttgtaagacgtgttgttcaataataaatatgacaagggccttctataaacagaaggctctttctttattaacatatacccttttcgaatacatttaatcgtgttgagcaaaaaaatagcgtatcaccatgagattttataggatatgggtaaggaatacgtttgatggggattcttatcttataagaaagagcccaaacttgaaaagatggtttaaggagtgaatagtgtgtcagaagaaaaaatttatgacgtgattataatcggcgcgggccctgctgggatgacggccgctgtatacacatcaagagcgaatttatcgacattaatgattgaaagaggaattcctggcggacaaatggccaatacggaagatgtagaaaactatcctggattcgaaagtatccttgggcctgagctttctaacaaaatgtttgaacacgcgaaaaaattcggcgctgaatacgcttatggcgatattaaagaggtcattgacggcaaagagtacaaagtagtcaaagctggttcaaaggaatataaagcccgtgctgtcatcattgctgcaggtgcggaatataaaaaaatcggcgtgcctggcgaaaaagaattgggcggacgcggtgtatcttattgtgcagtatgtgacggcgctttctttaaaggcaaagaacttgtcgttgttggcggcggagattccgcggttgaagaaggcgtatatctgactcgtttcgcttcaaaagtaacgattgttcacagacgtgataaactccgtgctcaaagtattcttcaagcgagagcatttgataatgaaaaagttgacttcctatggaacaaaactgtgaaggaaattcatgaggaaaacggcaaagtcggtaacgtaacgcttgtcgatacggtaaccggtgaagaaagtgaattcaaaacagacggcgtattcatttacatcggcatgcttcctctgtctaaaccgtttgaaaacctgggcattacgaatgaagaaggctatatcgaaacaaacgaccgcatggaaactaaggttgaagggattttcgctgccggagacatccgcgaaaaatcactgcgccaaatcgtaacggctacaggagacggaagcattgcggcacaaagcgtacaacattatgtcgaagagctccaagaaacgctgaaaaccttaaaataaaaagggctgtcatacgagtttcacattacgttactgggttttaattccgctgtaacacatgtgtaatgcttttcggttatgattaataaagtaattgaccccctttttataatgaatacacttttttggcacggattctccagttatccgtgtcctttttttgtccataaataaaagagaattccagttacagcaaaatcatctgaattaaggaatgaatatgctgtaaaatagaagaaaagattgtcaatgtctcttcattgtgggaggcatcttgaagcggtataataaagagacgatgacaggacgaaggttaggtgacgtacttgcaaagagtgacaaattgtgtgcttcagacggatgacaaagttcttctgcttcaaaagccgagacgcggatggtgggtcgcgccgggaggcaagatggagagcggagaatcagtcagagactccgtcatcagagagtacagagaagagactggtatctatatcataaatcctcaattaaaaggcgtttttacctttattattaaagacggtgaccacattgtctccgagtggatgatgtttacgtttgtcgctgattcatatacaggacaaaatgtatcagaatcagaggaaggcaaactgcagtggcacgatgtcaatgacattcagaacctgcctatggcccctggagacggccatatccttgattttatgatgaagggacaagggctgctgcacggcacatttacgtatacaccggaatttgagctgctcagttatcgtttagacccgcagcacatcaaatagaaagacaagtcaggggggagaaagatgagtgttagtgaatcacatgatattcagcttgtcattataactggaatgtcgggagcggggaaaactgtcgcgatccaaagctttgaagatctcggctatttctgcgtcgataatcttccgccttcattgcttccgaagtttttagagctgatgaaggaatcaaattcgaaaatgagcaaagttgcgctcgtgatggatttgcgcggccgcgaattttttgaccggctgattgaagcgctggatgaaatggccgaaaatccgtggatcacaccgcgaattttattcctggacgcgaaggattccattctcgtcacaagatataaagaaacgagacgctcgcatccgctggcagcgactggcctgccgcttgaaggcatcgcgctagaacgagagctgcttgaggaattaaaaggccgctctcaaatcatttacgatacgtctgacatgaagccgcgtgatttgcgtgaaaaaatcgtgaagcactttgcgacaaaccaaggagagacatttaccgtaaatgtgatgtcatttggttttaaatacggtattccaattgatgcagatctcgtctttgatgtcagatttttgccgaatccgtactatatcgaaagcatgcggccgctgactggcaaggataaagaggtttcctcttacgtcatgaagtggaatgaaacgcaaaagttcaatgagaaattaattgatctgctgagctttatgcttccatcttacaaaagagaaggaaaaagccaggttgtcattgcgatcggctgcacagggggccagcaccgctctgtgacattagccgagaatttagctgattatttcaaaaaggattactatactcatgttactcaccgggacattgaaaagagaagccggaaataagatgggacaaaagccgaaaatcgcaatctttggcggcggtacaggtctttctgtattgcttcggggcctaaagcataaacccgttgacatcacggccattgtaacagttgccgatgatggggggagctctggccgtctgcggaatgaactgaaaattccgcctcccggagacatcagaaatgtgcttgccgctttatccgatgtggagccgcttgttgaagatctttttcagcaccgcttcaataaagggaatgacttaacaggccattctctcgggaatttgattttggcagcgatgacaaatataaccggtgatttttttcacgctgtcacagaaatgagcaaggtgctgaatgtaagaggaaaggttttgccggctgccaatgccagtgtcgttttgcatgctgagatggaagatggccgcgtggtctcaggcgagtcaacgatcccagaatacggacagcgcattaagcgtgtttttctcacgcctgaacagattgatccgctgccggaaacaatagacgtaatcagggaagcggatttgattattatcggcccgggaagcctctataccagcattcttcccaatttgctcgtcccaaaaatcggggaagaagtgataaaggcgccggcgaaaaaagtatacatttgcaacgtgatgactcagcccggcgaaacgctccattacaccgctgctgatcatgtgaaagcgctcaatcagcatatgggctgtggttttattgatacgatattagtgaacagtgaagacattcccgacgaaataaaacgtaagtacgaaatggaatcggcgcgtcctgttgattttgatatcgaagagctgaaagcgatggggcttgaagtcatcagagatcaaattgtaacgtataaaaatgacgtaatacgtcacgatacacataaagtggcctctcttcttgttgatttactgaaagaatgaagccttgaaatgaggtggctatatgtcatttgcatcagaaacaaaaaaagaattaacgaatctggaagtgaaggactgctgcattaatgccgagctgtctgcactcattcggatgaatggagctttatcatttacaaaccgccatctcgtactcgatgttcaaaccgaaaacgcggcgattgcccgccgcatctatacattgctgaaaaaacaatatgatgtgtcggtcgagctgctggtcagaaagaaaatgcggctgaaaaagaataacgtctatattgtgcgtttttcagaaaatgcaaaagcgatcttagaggatttaaaaatactcggggagaattttgtgtttgaacgaagtatttcgaaagagctggtcaaaaagagatgctgcaagcgttcttatatgagaggagcatttttggcaggaggttcggtcaataacccggaaacctcctcgtatcatttagaaatcttctctctttataaggagcataacgattcattatgtgacctgttaaatgagtttcagttaaacagcaaaacgcttgaacggaaaaaaggctatattacctatttaaaagaggctgaaaagattacagagtttctgaacgtaattggcgctcacaattcgcttctgcgatttgaggatgtcagaatcgttcgggacatgagaaattcggtcaaccgcctcgtcaattgtgaaacagccaacttaaacaaaacgatcggcgcatcgctgagacaggtggaaaatattaaatacatcgatgaaagaatcggcctggaggcgctgcctgaaaaacttcgggaaattgcgcagctgcggattgattatcaggaagtgacgctgaaagagctaggggaaatggtagcaagcgggaaaatcagcaaatcagggatcaatcacaggctgagaaaacttgacgaaatcgcagaacagctgcggacagggcaaaccgtcactttaaaataaccgtaaagaaaaggggagatcttatggttcaacagaaagtggaagttcgattaaagacaggactgcaagcacgtcctgctgctttgtttgtacaagaagcaaaccggtttacgtcagatgtgtttcttgagaaggatgggaaaaaagtaaacgccaaaagcatcatggggctgatgagccttgcggtaagcacaggcactgaggttaccttgattgcccagggagaagatgaacaagaggcgctggagaagctggctgcttacgttcaagaagaagtttaggtgataaaaatgagtgactttctaaaagactgctttcagaaaatcggctgggagaaagaccatgtcagcttcggcgatcttcccctttttcttaaagcaatggcataccgttttccattcgaaaaccgtgccgtacttgcaaaagagaattataagatcacaaaagaagagctatggcgacgtctgctcaaagatcagcacggcggcctatgctacgatctaaatggtttcctttattttgtcttgcgtgaggccgggtttcatgtgaagctcattcgaggaacggtttatgcaggcgatcaagagggatgggcactagaagggacgcatgctgctgtatggctgtctgcggaaaacggcgattacctcgttgatatcggcttcggcatcaacctggcgctccagccgataccgctttccggagaaacggtacagtcaccagtcgggtcattccgaatcaaaaaggaagagacagaaaagggcagctatgttctgctgatggacaaaggagaaggctggcaaattgggtacgcctttacccttgaagagagtgatctcggtgatttagataacatgaaggacatcattcactctcatgaaaaatctccttttaacaaatccctgcttgcctcaaagctgacgccgagcggaaggatggtcatgtcagagcgccattttacgatttatgaaaacggcggtaacattcaaaaaagcgacatcggcccttcaggatttgaagagaaattaaatactcattttttgtaacgtgaaaagcttgcaggttatctgcaagctttttcttatgaacaagtgtagattgctgtatcaaatgcgtcttctgggatatacagttttcccttttcgtatttataaggaatttcattctctttaaagcactctttggtatagtcagttagtgtatccccaatttctatgtatttcccggtatagttgggctgacatgctgaaagaattgacgtcattgccagaaacagcatgattttcttcatcacgacacctgcctattatgaaaattttacctttatcattctatcataacaaaaagaaaaagaccgatttactattccgcacatgctataataattttggaatcttctagaaaaatcatcgtgatgtacatataagggggatcaacgtgtatcggattttgcttgtggaagatgatgagcggattgcttctttgctgggcggtcatcttcaaaaatacggatatgaagtgaaaattgctgaacagctgaatgatataaaattggaatttgcagaaatgaagcctgatcttgtgctgcttgatatcaacctgcctttttttgacgggttttattggtgcaggcaaatccgtaccatttccaatgcgccgattatctttatatcggcacggaccgatgagctgaatcaggtaatggcgattgaaaatggcggcgatgattatatcacaaagccgttccatctagaggtagtgatggccaaaatcaaaagcgtcctgcgccgcacatatggtgaatattcgccctctttgccgcaggaatctagaatagtggagcttggcgggctgacgatttatcctgatcagaatgaggccgaatggaacagcgtccggattttgttttcccaaaaagaattccagcttctctcgatttttgtgagggagcataaaaaaattgtctctcgtgatgaactattggaggcgttatgggatgacgttgattttgtcgatgacaatacgttaacggtcaatgtcaatcggctgcggagaaaactggagaatgcaggactgacagattgcatttccacaatcagaggacaaggttatcaatttcaagtcaatcggaaggatgaagcggaatgttaaagacttatctcatcgaccgcttagccattattctattttcattattagggatagggtccgccatgctgattgcgtatttaagcattgtagagagcggcgcagaaccttccaaagaaaatatgatgtacatatggattttgcccggtactcttttagccgcaggttttgctgctgattatgttcggcaattttcctttctcacatatgttaaaaagcttgcagaacaagcctcttcttcgaatgacatcggacagtctttgaaagccagaaagccaagaacaggagagcaagcgctttggacgaagatgatcaacgcactcgggcagcaatacgaaagcaggctctcacaatatatcaatcagcaaaaacagcattacaccttcaccaaccaatgggtccaccatatgaaaacaccggtatctgtcatatccttaatgattcaggaaggaaaaaacggaacctcatcctcttttccgacgtttttagaggagctggaggatgagaatgagagatttcgccacggtcttgatatgatgctgcaaacggcccggctggaggaatttgcatttgatgtaaagccgcaaacctttgatttggcagaaatggttcgttcactgatcaatcaggaaaaacgtcagtttatcaagcggcgcctttttccaacattacatgtgccgccaaatgccgttcagatttccagtgatcaaaagtggctttcctttgttgttgagcaaatccttttcaacgccttaaaatattcaaagcaaggtgtgggagaccctattacaatccggattgaaacacagggacatgagacgcgcttgtcggttgccgacgaaggaatcggcataccgccgcaggatctgccgcggatttttgacgcgttttttaccggagaaaacggacgaaccatgaaagaggcaactggaatgggcctttatttagcaaaacaggtgtgcagccgtctcggccataagctgtatgcggaatcaaaagaaggggctggcactgtgatgaccatcgtgttttcaagtgacaccctcgtgaatgtgacagcattgtaagattggggagcggaattgcaagaaagttcgatgggaggatgctgacttcctttttataataaagaaaaaggaggagcagaacatgaacgtgttgcaaacaacgaacctatcgaaaacatactattcaaataaaggaacaatatcataccaagcgctcagcgcctttgatctcagtgtgtcaaaaggagaatttgtcgggattatggggccgtcgggaagcggaaaaaccacgcttttgaatttgctggctaccattgataagccgacccagggcgagatgatgatcaacggcattcagccgaaaacgttaaaggaccaagagctggctttgtttcgcagaagagaactcggcttcgtctttcaggattttaatctgcttgatacgctgacgattcgtgaaaatattctcttgccgctcgcattggataaggtaaagctgagagaaatggaagctcgattggatgaactggcggatacgctgcaaataaagcatattctcgatcaccgcacatatgaggtgtcgggcggacagcagcagcgggcagcttgtgccagagcgattattcacaatccggcgctcattcttgccgatgaaccgacaggaaacctcgactcaaaatcggcaaagcaagtgatgaacacactggctcagctgaatgaggaaaaggaagcgacgattttgttggttacgcatgatgccacagcagcaagtttctgtaaacggattgtttttattaaagacggacgtttcttttcagagattcacagaggaacaaacaggcaggtgttttatcaaagtatattggataccttgagtgtgttgggaggcgattttcatgaatttgagaactatcgcccgtaaaaacattcttgggaatctgcaacggtatgtggcctactttttaagctgtgtgtttgccgtttcggtgttttttgtcttcacatcatttatttttcatcctgatgtcaatgaagacaatatatatggaggaagccttgtcaaaacatgcttgagcgcagctcttgtcgtcatcattgtgttttgtatatttttcatcacatattccaattcagcgtttttgcaggcaagaaagaaagagtttgggctgctgacactgtttggcacatcaaagcagcagcttcgcaagatgatttattatgagcagtcacttatttctcttgcggcgattgcggccggcattggagcaggcctgttattttcaaaactgttttttatgatcatgacatggatgctcagcgtgaaggtgccgatttcgtttgccattgtgccgaaagcgtttgtgatgacaattgccggctttctcatcctgtttcagacgctgctcattttatcactgggacggattcggaagctggaaatcattgaactgattaaatcagccaaaaagccgaaaagtttgccagtttattcgaaatggctcactgtattgtctttgctatgtcttggcagcggttattatctatctgcaacagccaatgcaattgacatgatgtttcgggtttttccaattttgattttagtgttaattggcacgtatttcttttttacccaaagcagtgtggcatttttccgcatgctgtaccgaaagaaacacagcttctacaaaggcacaaatatcattgtgcgttccaacatgatattcaggctgaaggatcatgcacgcatgctgtttttaacctctgtcattacagcggtcatactaacagctacaggtgtcatctatatgttttattccgatttacaaaggcaggaggagcaaagcattcctcagtctgtttcctgggtggaaaaggatgcttcccgctttcaggtcatgaagcctgagacggctgagaatacattgaaaaaagctcatgctgttatcacgtataaggtggatgccacagggattcctgtcacttttcagtcagacttgccgtatggaaataagaagatggaagctgaagctttgctgatttcagaaaaagtctataatcaagtcgcaaaggaaaaagggttcccagttattcatttacaagaaaatgaagcatttattaatgtttcttttcaaatgatggtgaaagacacatttggagaaggggaaacagcagcatttcatatgaagtcaggaaaaaccctttcctatgtcatgaaaaagcagcaaaacaaagggatattgatgtctgtcgatggagtcagccgtttattggttgtcagcgaaaagagctttgacagtctgtcacaggatgtgccgctgaaggaacagatgagaatggtaggttatgagcttgagcattggcaggagacggtggatgtctctgaaaagcttgaaaacatggtgccgaaagaacatacatctgattttcaaacacgtgctcctagttatcaaattgtgaagcagggagttgcattaatgctgtttattggtctgtttgtcagcgtgctgttttttatcgtgcaaggaagcatgctgtatttgcggatgtttacggaaatagaagatacgggagtgcaggtgttagcgttaaagaggataggggttacggacaaagagattcactcgatccttggaaagcaaataggatttttattcttcatcccatttatcgcaggtacgattcacgcgggctttgcgtatgcagcgttaagtaatatgctgaattccaatttatttcttgaggccgtaattgtcatcttcatttattttgtattccaggctctttattatatcgtcacccgtcatatttataagcgtgctgttcttcagcgtatgtaatatgaaatccggtctgttatcagaccggatttttgatttattgaaattctcttgtaagatttttcggtgtttgcccttggatcgctgcgagcatattttcggcggcctgtttgcacatgttgaagcgcactttagctgttgctgaaccgatatgaggaagcagcgtgacattatccagctgcaggagcggattatcttgggtgacaggctctttttcgtatacatctaagccggctcccctgatccagccttcctgaagagcgcgaatcagtgctttttcatcaactgtctttccccgggaaatattgacgaaaattgctgaattcttcatcaacttaaattcgcgttctcctatcatgtgataggtttcatcagtcagcggcgtaatgagaagaataaaatcagattgctccagcaatgtatcaagctctgcatacttaacgccgatgctgtcttctgtttcttgtttgcgatgtcggttatgataaagcacttccatatcaaaaccaaatttggcgcgtctcgctgcttgttctccaattctgcccatgccgataatgcctaacgtttgatgatgaacatcaattccgaaaagcgcttcctcttccacggttccccattttcctgctctgacaaaacggtccagttcggcaacacgtctggcggaagacagaatcagtgaaaaagccagatctgcaactgtgtcatccagtgtataaggtgtatgagtcccgacgactcctctttctttcattgcttctatatcgaagttatcgtagcctactgattggttgctgaccactttgagcttaggcgcgtgttccagcaactcacgattgattgacggtccggacgtccctgatgttaaaagcccctccgcttcttttaatttttcaaatagcacgtcactcggaagcgtatcctcctgccatacttcataacggcaatgttcaccgatgaatgcttcaatctcttcaggaatcggttttgtgataaatacaaatggtttcaacaaggctccccctttatggctgttgtctaattcattatatcgaaaataaatagatgttaaaaatatagctgcgtttttttaatttctggttcttttgaacttaaaatgaagatcgaacagctaaatctgcttaaaaaagttttttaattatcagaattcacccatattttttgtcagacaaatcatcgatatacgaactgcagccggattataggatgcattaaatataaattttattatctttgaaagatataaatgtttatgttttgattctacagtccaattatagtgtctttttttgaaaaccttttcttggcttattcctatgctataattccttactgtaagctgggtaagaaggcttgcaaaatcatatggatgggagatgaatcaaatggtttctttaacatcaattttggaacacaatcagcggtttgtcagtgagaagaagtatgaaccgtacaaaacgacaaagtttccttcgaaaaagctcgtcattgtcacctgtatggatacaaggcttacagaacttcttccgcaagcaatggggcttaaaaacggtgatgctaaaattgtaaaaaacgcgggagccatcgtttctcacccatttggaagcgtgatgcgaagcatactggtcgcgatttatgaattgcaggctgaagaggtatgcattgtcggccatcatgaatgcggaatgtcagggctgaatgcgtcctcgattcttgagaaagcaaaggaacgcggggtggaggatagctgcctgaatttgctgacgagtgccggactcgatttgaaaacgtggctgactggttttcacagcgtggaagaaagcgtttcccacagtgtgaacatgattaagaaccatccgctgcttccgaaaaaagtgccggttcacgggcttgtcattcaccctgaaacaggaaaacttgatgtggtcattaacggttatgaaactgagcttataaacaatcactcataagggaggttataacaaaatatgcgattctcagggagattcaagggatacaatttgcagaaatttcagaaagacttgattgcaggtatcgtagtaggtgtcgtggcaattcctttaggaatggcgtttgccattgcctcgggagtcgagcctgaatatgggctatacactgttgttatagcagggatttgtatttctttgtttggaggatcaaaatatcagattggcggtccgacgggcgcctttgtcccgattttattcggcattatcatgcagtacggcttggaaaatctgctgattgcggggtttatggcaggagtgatgctggtactgtttgggctgtttaagctcggaaaaataatgaaattcgtgcccaaacccgttatcgtcggttttacagccggaattgccgtgctgatctttacggaacaaatcgctaattttctcggattgagaaatgttgaaaaacatgagaactttcatcacaacatgtttgaaattgtgcagcagctcggcacctttaacgtgtatgccattttgacagctgtgatcgggctcgtcattttgcttgtatccgccaaggtgatgcctaaagtgccgggcgctttgttggcgcttcttatttccacagtggtcgcggttgtctttttccctgaccgcatggcaacgatcgggtcaacttatggagaaatcccccgccatttgccggaatttcagtttcctgagcttactttggataaaatggttatgctgtttccggctgcgcttgtcatcgcgcttcttggaggacttgagtcgattttgtccgcaatggtcgctgataacatgaagggctcaaagcatgacagcaacaaggagcttgtcggccaggggattgcgaatatggcagcgcccctgtttggcggaatcccggctacaggagcgattgcgagaacggcgaccaatataaaaaacggagcggtttccccagtttccggcgtcgttcacggcgtagtcgttctccttgtcctgcttgtatttgcgccttatgcgtcccatgtgccgctcgccagtatggcaccgattctcatggtggtcgcatggaatatgagtgagcgcaaggaagtcgcaaacatgctgagactgaaaaatgctgattcctttattttggcggcgaccttcgcccttacggttctgtttgacttaatcatcggtgtggcaaccggattgctgcttgcattcgtgttctttatcagaagaatgagcgaagcgacccgcatccacaatcaggaaacgcatcctgttctggcgaagagagaagatccatctgtcagcatgtatgccatagaagggccgctgtttttcggatcaattgattcccttgaatcgtcattgctggagcatgtacagaaaaaaccgaaaacccttattctgctcatgaataaggtgcactatatggatacgtcagctgaagcggtgcttgggaacattatgaatcgaattaaacgccacaatggaaagctgatgattgtaggattgcaatcgcagccgaaggagctactgcataaaacaggcctttttcacaaaataggaaagcagcatttctttgatcaccatgatgaaatcacaggttaaaaaaagcggccatcgcggccgcttttttatgcatgctcaaatcgttttgtcagtttttcttggtgggccttcatgacgtcttctaaagagacaccatacatatcagcaagaatggcgatatttccgatgacatctcccatttcttcaatcaattcttgtttttgctcagcgcgtgacgattctttctcatccggccggtctctgccgatttcatacgccctgacagcccgggccagttctccggcttcctccattaaaaagccgacgcgaataaaaggtccgtattctgtccagcctcttttttcgtaaaactctttcatccatttttctgcatcagccagctgcaacctcatcactcctgcattctttatgtatttcatattgatattatcacatgaagatgggacaatatatagtgtgtttttgaatgtttaacacgatatatagatgcggagatgacaagatgaaaaccatttgtgtatttgcgggatcaaaccctgggggaaatgaagcgtataaaagaaaagcggcagagcttggcgtgtatatggctgagcagggaatcggccttgtctatgggggctcccgcgtaggcttgatgggcacgattgctgacgcgattatggaaaacggcggaactgcaatcggggtcatgccgagcggtttgttcagcggggaggttgtccatcagaatctgactgagctgattgaagtaaacgggatgcatgaacgaaaggctaaaatgagcgagctggcggacggctttatctcgatgccgggcggcttcggtacatatgaagaattatttgaagtgctgtgctgggcacagatcggcatccaccaaaagccaattggactgtacaatgtaaacggatattttgaaccaatgatgaaaatggtgaaatacagcattcaagaagggttttctaacgaatcgcacctaaaactgattcacagctcgtcacggccggatgagttaattgagcaaatgcaaaattattcttatccgattttagaaaaaaagtggacagaaatttaaaaaagagattttctgatggaagtggagagaatgagtctgccacctagcgtatgaatccatgaaaaatcgagtgtttttaacaaagtgaggtttccttaagggaaatctcttttttatttctctttggcctgcatcgtatatttagcagtaatagaggactttatcactagtttggataataagcacagataaggaggggatgaaaatggcaacattgtcagatgtggcgaaaaaagcaaatgtttcgaaaatgacggtatcacgagtgatcaatcaccctgagacggtgacggatgaattgaaaaagcttgttcattctgcgatgaaagagctgaattacatccctaattatgcggcgagagcgctcgtgcaaaacagaacacaggttgtgaaactattgatacttgaggaaatggatacgacagaaccatattacatgaacctgctgacaggaatcagcagggagctggatcgcaatcactatgctctccagcttgtgacaagaaattctcttaatattggccaatgtgacggcattattgccaccggcttgagaaagaacgattttgaaggtgtaataaaagcttttgagaagccgctcgtcgtatttggacaaaatgaaatgggctatgactttatcgatgtgaataacgagaaaggcacttttatggcaacccgccatgttatggggctgggggagcgggaagttgtcttttttggcattgatttagatgagcctttcgaacgtgcaagagaacaggggtatatacgggcgatgaataaaagctttaaaaaatcgaatatgtttcggatcgacaacagttctaagaaaagtgaatgccttgcaagagaactgctgaaatccatggacaatcaggccgcatttgtctgcgcatctgatcgaatcgcgctcggcgtcattcgtgcggcgcaatcccttggaaagcgaattccagaagacgttgcggttaccgggaatgacggtgtgtttcttgatcgcatctcctcgccgcgcttgactacggtcagacagcctgttgttgaaatgggggaagcctgtgcgaaaatgttgctgaaaaaaatgaatgaagacggcgctgcacaaggaagtctattttttgaaccagagttaattgtacgagaatcaacgctgtaagcgccttattctgttatcggtaacagggtgaaaaggattgttcccacaatttcatcatgatactttcaaactatgagccggcttcaataaaacggaaatcaaagggggaaacatgatggaatatgcagcgattcatcaccagccattcagcacagatgcttattcttatgatgggcggactgtgcatatcaagattcggacgaaaaaaggtgatgcagatcacattcgattcatttggggtgatccctatgagtacaacgacggcaaatggtcggcaaacgagcagccgatgaggaaaattgctgctacagaaatgcatgactattggtttgctgaagtggtgccgccatttaggcgtttacaatatgcgtttgttgtaacagacgatcatgaagacatctttttcggaagttcgggtgtatgcccttataacgaaaaaacactggaaacgattcattattactttaaatttccgtttgttcacgaggctgatacatttcaagcgcctgaatgggtcaagtcaacggtttggtatcaaatttttccggagcgttttgcaaatggaagagaagacttgtcaccgaagaatgcattgccgtgggggagcaaggacccggacgtcaatgatttttttggaggggatttacaaggaattgttgacaagcttgattatttagaggatttaggggtgaacggcatttatctgacaccgatcttttccgcgccttctaatcataaatacgacacgctggattacttttctattgatccgcatttcggggatcctgagctttttcgtacattggtcagccagctgcatcagcgggggatgagaattatgcttgatgcggtttttaaccatataggaagcgcgtctccgcaatggcaggatgtcgtcaaaaacggagatcaatcccgctataaggactggttccatattcactcttttcccgtcacagacgacaattatgacagatttgcttttacagctgatatgccgaagctaaacacggctaatcccgaggtgcagaaatatttgcttgatattgctttgtactggattcgcgaatttgacattgacggctggcgtttggatgtcgcaaatgaagtggatcacgttttttggaagacatttaggcaggctgtatctactgaaaagcctgatgtttatattttaggtgagatctggcattctgccgaaccctggcttagaggggatgaatttcatgcggcgatgaattacccttttacagagcctatgattgaatactttgctgaccagacgatctcagcttcacgtatggctcaccgtgtcaatgcacatttgatgaatggaatgaagcaggccaatgaggtgatgtttaatttactggatagccatgatacaaagcgccttttgaccagatgccgcaatgatgagaagaaagcacgcgcgttgctggcctttatgtttgcccagacaggctcaccatgcatttattacggaacggaaatcgggctgaacggcgaaaatgatccattatgccggaaatgtatggtttgggaaaaagagaagcaaaaccaagacatgctgcaatttatgaaacggttaattgctttacgcaagcaggaaaacactttattgactgaaggacatcttgagtggaatctgctggacgacaaaaatgatttcattagcttttcgcggactcttgatgaaaaaatactgatttatttctttaatcaagggaatgtggttcaacacgtcagtttacgagagttgaatattgataggaataagaaaatctgtgatgcatggacagagcagccgctacagcatcacgatgtcattgccgttcagccgggagaatttttgattttgagtgctgccgcccctgtataacattctgttatcggtaacaaatcgaaagttgttgtaaccgctttctataggacaatacaattgttatagtttcgtaaatagaaggaggaaaagagatggttcttttaaaaaaggggttcgccatattggcggcatcattcctggcaatcggccttgccgcctgctcaagttcaaaaaatccagcaagctctgatggcaaaaaggtgctgactgtgtctgtcgaagaaacgtataaagaatacattgaaagcataaaaacaaagttcgaaaaagaaaatgatgtcacagtaaaaattgttgaaaagcaaatgttcgaacagttagaagcgcttcctcttgatggcccggcgggtaatgcgcctgatgttatgcttgctgcatatgaccggatcggcggtttgggacaacaaggacatttacttgatattaagccatctaacacaaaaagctttggtgataaagaaatgcagcaggtgacagttgacggcaaagtgtacggaatgccgctagtcattgagacacttattttgtattacaacaaagatcttttaaaaacagcgccaaaaacatttaaagaccttgaaaagttaacggaagatcctcgattcgcgtttgcttcggaaaaaggaaaatcaaccggatttttagcaaaatggactgacttttatatgtcgtacggcttattggctggatacggcggatatgtgtttggaaaaaacggcacagattccggggacatcggcctgaacaataaaggggctgtagaagcggtgaaatatgcggagaaatggtttgagacatattggccgaaaggaatgcaagacaattcaagcgcagacgactttattcagcagatgtttttagaaggcaaagcggctgcgatcattggcggtccttggtcagctgccaactataaagaggctaaattgaactacggagcggctcccattccgacattgccaaatggagaagaatacgccccttttgctggcgggaagggctgggttgcctcgaaatatacaaaagagcccgagctggctgaaaaatggcttgagtatgctgcaaatgatgccaatgcttacgctttttatgaggatacaaacgaagttccggccaacacggctgcaaggaagaaagccgatgagcaaaagaatgaactgacgtcagctgtgattaaacaatatgaaacagcaacgccgactccaaatattccggaaatggctgaagtatggacaggagcggaaagtttaatttttgatgcagcttcaggaaaaaaatcgacacaaacatcagcgaatgatgctgtaaacgtcataaaggaaaatattaaagaaaagtatgtgaaataaaacggcgggatagcgtccggaagaatagagggcggaaaaatgaataaacatcacacacttacaaagcaaaaacgaaaggcagggcttttatcgatcattccaggacttgggcagattgcgaatcagcagttgtcaaaggggctcttatttcttgccatcacaggcttgtttgcttttgaattatgcgttttcggtatacaggcgctaaccggattgatgacattgggaagtgttcccggtgaagatcactcgctgtttatgctgattgaaggcacgctgcaattgatcgtgacaatgattttcctcatgttctatatctttaatattcatgattcacgtaagaccgccgctatgaaagcggcgggtttggaagtcaatacaacagccaaggatatgatctgtcatgcgggcgataaaggttttccgtatctatttacactgccggcatatatcatgatggtgtttgtgattatttttccggttttggtgactctgtttgttgcattaacaaactatgatttttatcatattccgcctaatcgtctgattgactgggtcgggtttaaaaatttcttaaatatttttttccttggctcctatcgtgaaacatttgtgaatgtactgggctggacggttatctggacaatctgtgcaacaacgctgcaaatcattttaggtattgtgacggcacttttcgtcaatcaggattttataaaaggcaagcggatatttcgaatgattttcttatttccatgggctgttccggcgtttattacaatcatgagtttttccaacatgtttaacgacagcataggagcggtgaatgcacaggtgataccattattcaatcacctgccgtttgtcgagctgcctgcgatcgcgtggaagaccgatcctttctggacaaagacagccctcattatgattcaaacgtggctcggctttccatatatatatgtcatggtaacgggagtgcttcaggcgattccaggtgaattgtatgaagcggcaaagattgacggggccacttttattcagcgttttcggcatattacattcccgatgattttatttgccacagcacccgtgatgattactcagtatacgtttaatttcaataatttctcgatcatctatttatttaatgagggagggccaggcagtgcgggagccggggccggatcgaccgatatcttaatttcgtggatttataaactgacaacaggcacatcaccccaatattccgttgcggcggctgtgacactgttaatttctttcattgtcattggaatttcactgattgctttcaaaaaatcgaatgcttttggcaatgaggaggttatgtaggtgaacgcgagcactgccagaatgcttaataaaatctgtacgtatttatttttgacgcttttaagtattgtcattatatatccgttgctgattacggcatcatcagccttccgtgtggggaattcggcggcttttcagctcgatttttcgggttcttggacattggatcattttaagcggctatttgacgaaacgctttatctcaattggtacagcaatacacttgtcatcgcgctatcggtcatggttttgcaggttacgattgtgacacttgccgggtactcgtacagccgctatcggtttgcaggcagaaaaaagagcctgatattctttttaatcattcaaatggtgccgacaatggcggcgctgactgctttttatgtcttggcgatgctaataggcgcactcgatcaatactggtttttaacagcgatctatatcggcggcggaattccgatgaacacgtggctgatgaaaggttattttgatactgtgccgagagaaattgatgaagccgcgcgaattgacggagcgggacatctgaggattttcgcttcaattgttctaccgcttgttaagccaatgctcgcggtacaagcgctttgggcgtttatggcaccgtttggcgactatttgctgacgaaatttctgcttcgctcaccggaaaggctgaccatcgctgtaggattacaatcctttatttctaatccgcagcagcaaaaagtagctctatttgcagccggtgccatactagccgcactgccgatatgcgttctattcttttttctccaaaagaactttgtgtccggtttgacagccggcggaacaaaggggtaatgccaatgaagaatctggagaataaaagctttatcatccgctgcctgaaggcggctgcatccccatcaggtgtttgccgctatgggaataccttcagctggctgcagctctcttttctctttctgtttttaacggcctgcttaatggcgccgttagcggtttcgtttgtgaaaatggatcgcttcagcgtttcatctttcatgccgtcagcgattcaaggagttaatgatcaatttgctgatcaattgcagggttttcaaatcaggaacggaaaactaacaggcgggaagagctctgagaggattgaagatgggcagaatgtgatggcagtcgatatgaagcatgaatatgagacaagcggtgaaaatgggcgattgaaagtaactggatttgaaaacgccatcatatttcaacctgatcaactggtgatcaccgatcaaaacgaaacggggttttctgttggctatgcgaaaatggacgttaagctcgagaaaccaaacgtccatgatgtagaggtcttgatcgatacattgtggttggcacagtataagccgatgatcatgatgctggcatatacggtggtttctatgatccagcttttgttaacgtttgttcttgcaggtggcctctggatcacaaaaatatcaaacatggtctctattgcatcattcaaggaagcggcctctatagcgatttgcgcatcagcactgccggcatttgcggcagctgctatcggcatggttcattttgatttgattactgtattgatgatccattcgtgtggcgttactttgatgatctcttttgcatttagatatttgaccaaaacccgccgtgataatggaaacttacattcgggaggaaatgatgataaatcagcggttatttgagattgatgaatggaaaatcaaaacaaatacatttaataaggagcatacacggctgctggaaagcctgacgtctcttgccaatggctatatgggggtcagagggaattttgaagaaggctattcaggcgacagtcaccaaggcacatatattgcaggcgtgtggttccccgacaaaacgcgagtaggctggtggaaaaacgggtatccagaatatttcggaaaagtgatcaatgcgatgaactttatgggcataggcctatatgttgacggtgaaaaaatcgatctccatcaaaacccaatcgaattatttgaggtagaactcaatatgaaagaggggattctgcggcgaagcgctgttgtccgcattcaagataaaaccgtcagaatcaggtcagagcggtttcttagccttgctgtaaaagaactctgtgcgattcattatgaagcggagtgcttgacgggagatgctgtcattacgcttgttccttacctggatggaaatgtggcaaatgaagattctaactaccaagaacagttttggcaggaggaagcgaaaggtgctgattctcacagcggccatttagcggcaaaaacgatcgaaaatccatttggaacaccgcgcttcacggtattagccgcaatggcaaacgagacggagggttttgtccatgaaagctttaaaacgactgaaatgtatgtcgagaatcgctacagttatcaaacgaaggcatcattgaaaaagtttgtgattgtcacgacttcccgtgattttcgggaggaagagcttttatcgaaagccaaggagcttttggcggatgtggtagagaacggctatgaagatgcaaaacggaggcacactgatcgatggaaggaaagatgggcaaaagcggacattgagattaaaggagatgaggagcttcaacaaggaatccgctacaatatctttcagttattctcgacatattacgggggcgatgcccgtttgaatatcgggccgaaaggatttactggcgagaaatatggaggtgccgcatattgggatactgaggcgtacgccgttccgatgtatttggcgacagccgagccggaggtgacgaaaaacctgcttttgtatcgctatcatcagttggaggctgccaaacgaaacgctgcaaaattggggatgaagggggcactttatccgatggtgacgttcacaggtgatgaatgccacaacgaatgggaaatcacctttgaagaaattcaccgcaatggcgcgatctgttatgcgatctacaattatatcaattatacaggcgaccgtaactatatggaagaatacgggatagacgtacttgtggcagtcagcagattttgggccgaccgtgttcacttctcgaaacgaaaaaataagtatatgatccatggcgtcacagggccgaatgaatacgaaaacaacgttaacaacaattggtatacgaatgtcattgcggcttggacgttggagtatactctacaaagtctcgaaagtatctcagcggagaaacgccgccatctggatgtgcaggaagtagaattggaagtctggagagaaatcatccagcacatgtactatccatttagtgaagaactgcaaattttcgttcagcatgacacgttcttggacaaagacctgcaaacagttgacgaattagatccagcggaacggcctctttaccagaattggtcatgggacaagattctccgctccaattttattaagcaggcagatgttctccaaggcatttatctttttaatgaccgttttacaatggaagaaaaacggcgaaattttgaattttatgagccgatgactgttcatgaatcaagcctatcgccctctgtccatgcgattctcgcagccgaactcaagctggaaaagaaagcgctcgaattatataagcgcacagcaaggcttgatcttgataattacaatcatgatacggaagaaggcttgcatattacttcaatgacgggtagctggctggcaatcgttcatggctttgcaggcatgcgcaccgcgaatgagacgctgtcatttgctccgtttttgccgaaagaatgggacgaatattcattcaacatcaattatcgaaatcgattaatcaatgtgacggttgacgaaaagcgcgttatttttgagcttgtaaaaggcgagccgctgcacatgaacgtttatgaggaaccggttgtcctacagggacgatgtgaaaggagaacgcctaatgagtgaatggtggaaagaagctgtcgtttatcaaatttacccgcgcagtttttatgatgccaatggagatggattcggagatttgcaaggtgtgattcaaaagctggattacatcaaaaacctcggggcggatgtcatctggctctccccggtatttgattccccgcaggatgacaacggatatgatatcagcgattacaaaaacatgtacgaaaagtttgggacaaatgaagatatgtttcagctgattgatgaagtccataaacgcggaatgaaaatcgtcatggatttggtcgtgaaccacacatcagatgagcatgcttggtttgctgaaagccgcaagtcgaaggacaatccttaccgggattattatctttggaaagatcctaaaccggacggctcagagccgaataattggggatcgatcttttcaggctcagcgtggacatacgatgaaggaacagggcagtattatttgcactacttttcgaaaaaacagcctgatttaaattgggaaaacgaagccgttcgccgggaagtttatgatgtaatgagattctggatggatagaggcgttgacggctggcggatggatgtgattggctctatttctaaatacaccgattttccggactacgaaacggatcacagccgcagctatattgtcggccgttatcactctaacggcccacgtcttcatgagtttattcaagagatgaacagggaagtgctttctcattacgactgcatgacagtcggagaggcaaacggctctgatattgaagaggcgaaaaagtacacagatgcaagcaggcaagagctgaatatgatctttacatttgaacatatggatattgataaagaacaaaactcgccaaatgggaaatggcagatcaagccgtttgatttgattgctttaaaaaagacgatgacaaggtggcagaccgggttaatgaatgtcggctggaataccctttattttgagaaccatgaccagccgagggttatttcccgctggggcaatgacaggaaactgcgtaaggaatgtgcgaaggcatttgcaacggttctgcacggcatgaaaggaacgccgtttatttaccagggagaagaaatcggcatggtcaacagcgatatgccgctggagatgtatgatgatcttgaaataaagaatgcatatcgtgaactagtcgtcgaaaacaaaacgatgtcagaaaaagagtttgtcaaagccgtgatgataaaaggaagggatcatgcgagaacaccgatgcagtgggatgccggaaaacatgcgggattcacagccggagacccgtggataccggtaaattcccgctatcaagatatcaatgtgaaagagtctttggaagatcaagattcgattttcttttactatcagaagctcattcaattacgaaagcaatataagattatgatatatggcgattatcagctgttgcaggagaatgatccgcaggtcttttcttaccttcgagaatatcgaggggaaaagcttcttgtcgttgtgaatttatcggaagaaaaggctctgttcgaagcgcctccagaactgattcatgagcgttggaaagtgctaatttcaaactatccgcaggagcgggctgacttaaagagtattagcctcaaaccttatgaagctgtgatgggcattagtatatgaaagcggtcatttttgatttagacggagtgataacagatactgctgaatatcattttctcgcttggaagcacatcgcagaacaaatcgatatcccttttgacagagacatgaatgaaaggctaaaaggaatcagcagagaagagtcacttgaaagcatattgatctttggcggggcggaaacaaagtatacaaatgcggagaaacaagagcttatgcatcggaaaaatcgcgattatcaaatgctgatcagcaaattgacgccggaagatcttttaccggggattggcaggcttctatgtcaattgaaaaacgaaaatataaaaatcgggttagcatcttcaagtcgcaatgctcctaagattttaagacgcttggcaattatcgatgattttcatgccattgttgatccgacgactcttgcgaaggggaagcctgatcctgacatctttttaacagctgcagcgatgctcgatgtttcccctgctgattgcgcggcaatagaagacgcagaagcaggcatttctgcaatcaaatctgcggggatgtttgcggttggtgtcggtcaaggacagccgatgcttggtgctgatctggttgtgaggcagacgagtgatttgacgcttgagctgttacatgaggaatgggagcagtatagaataagggagtcaattccttgaaatgaaaaaaacctgcaagagacgcagctcttgcaggttgtgttattactttttgtcttctgtgtgagtcaaaattttgtcaatcaggccgtattcaagcgcttcttcagcagacttgaagttatcacggtctgtgtcgcgttcgatcacttcaagcggctggccagtacgttcagctaggactttgtttaatttgtcgcgaagcaagagaatgcgtttcgcagcaatttcaatttctgtcgcttgaccttgcgcaccgccaagaggctggtgaatcatgacttcactgtttggaagcgcatagcgtttgcctttttcgccggctgcaagcaggaacgcgcccattgacgcagccataccgatacaaattgtagataccttcggcttaataaactgcatggtatcatagatcgccataccggctgtaatagagccgcccgggctgttgatgtaaagagaaatttctttttcagggtcttctgctgctaagaataaaagctgtgacacgatggagttcgcaacgttgtcatcaatcgcagatccaagcatgatgatacgatcctttaatagacgagaataaatgtcatacgctctttccccgcggttcgtttgttcaatgactgtaggtattaaattcataatgctcctccttcaccttttaggtaagtatgtagttacatgatacatttttggtcaataaaggtcaaacaaaaagctggcctgatatgcaaagtcgtctctttttcccattttccccaaaaatacaggggttcaaaccatcgtatgtcagattgccaattaagatgctttgtctatttaaaaaacggcctctcgaaatagagggttgttatttgaaaggaattatcgtataattagttgtgctgacgttctcataacgcagtctatatgcgctcgtagctcagttggatagagcggtggtttccggtaccacgtctgtcgggggttcgaatccctccgagcgcgtccaatagaacaacaggaaagacaagggtttggcgatttgccgctattgtctttttttgtgtgaaaaagggaattgcataccttagagtaacatttcaattacattctttagtttgaaccctcactttcaaaagaagaagtatgaattgattttttcattcatcttattagcttgtgattaacaaacctttaaaaaaatccggttctacccattgcctgtatttattttgagaatcttctctcggacaaaattgtataagcgagaattgatttaaaataaataattatttgctcccccagttcttctctataaattgattcgcaggctgtaagtttgttttgttcgcaatttcaatgacagcgggaacgacggcagggtccgttttggagaagttcggaatccgcggatctaaccggaaaaaacgatctcccagaagattcgcactgaccatggattcatagtacccattaccgccagcaatcatctgaagaaatggcagtaaaggttcattaggcgacctgtccaaaaggactccccaatttggaggaaggttcttcagattttcgggacgtatgttatctgcacttaccattccccatcccctcgtatctcttcttaaccgagtcggggcttcacctgttccgatggacaataccgcaatttgatccaatggcacgttggctttaccaactgcaaacgcgatactggctgtactgggattcgttgctactacatatccgtccacatagttttgataggcgcgttgcgtcgcgggagcaccgctgctccgcagtatgacatcactcactttttcatttaaatagggagagccgggaaaattgtgaaataagacaggagtccaacggtccagtttttgagagtataatttgaatgatgggacaacaattcgttttcttaaatctataagttgaagatctgctgggaaaaaatttcttaccgctttaataaaaccggaatagggtaattgttggttgaaaacaggtccgcctggccgggaaatgctgaatgcgggtaggatttcatcctcaaaatactgaagtgtttccctcggagatcttccgcttgctaatgcaagggcagtaaatgaaccgattgaatttcccgaaaatacatgggttcgactaattaacttcgggttttgcctagccaatctgtttaatagttgtaaacttaaagcacctaaggtaccgccgccgtcaaaggtcataatccgatattttgccaaagctgatgtctcctttctacatacattcagtatatgatgatctagagtctgttgtatggatgtatacctctggtactaaacacttcttcatctctcttttcttttggcctaaacgaatattcactccgaaaaaaactggacactgctcctaaaaacgataagaaaaaacgcttgttggaggattggacaggaagtttgctcaaaattgtttgaaaaatgtttctcagcagacctcaccgacgaaaaaggccttagcgtattatatttatagttcgtagatcatttgtctatgcgattatccagctcctgcatattttagtatctgaatcgaatttctttgggagtgaaataatatatgggatcaacacagttgacagggcgtgtaatcttcaaaggagaccccggctatacagaggctattaagaattggaacccttatgtggatgtctatcctcttgtctttgtttttgcgcaaaattcatacgatgtaagtaatgccattaaatgggctcgtgagaataaagtgcccttacgtgtcagaagcggtcgccatgctttagataagaacctttcagtagtaagtggaggaattgttattgatgtgagtgacatgaataaagttttcttagatgaagaaaacgctattgcaaccgttcaaactggtattcccgttggcccgcttgtaaagggattagctcgagacggttttatggctccgtttggagatagcccaacagttggaatcgggggaattacgatgggcggcggatttggtgtactctcacgatcgattggccttataagtgataaccttctcgcgctgaaaacggtagatgcaaaaggaaggattattcacgcagatcaatctcacaatgaggatttgctatgggcttctagaggcggaggaggaggtaactttggatataatacccaatatacattcaaagttcatcgtgcccctaaaactgcaaccgtcttcaatattatctggccgtgggaacaattagaaacggtatttaaagcttggcagaaatgggctccgtttgtagatgaacgattaggatgctaccttgaaatttacagcaaaataaatggtttgtgtcatgcagaaggaattttcctcggttcgaaaactgaattgattcgattattaaaacctttattacatgcgggaactccaacagaagcagatatcaaaacattatactatccagatgctatagatttcttagaccctgacgaacccatccctggcagaaatgatcagagtgttaaattctcctcggcatggggtcatgatttttggtctgacgaacccatttcaatcatgagaaaatttttggaagatgctactggaacagaagccaatttcttttttatcaattggggtggtgctataagcagagtccctaaagacgaaactgcctttttttggcgccatccattattttatacggaatggacggctagttggaaaaataaatcacaagaagattcaaatcttgcatcagttgaaagagtgcgtcagctgatgcaaccatatgtagcaggttcatatgttaatgttccagatcaaaacattgaaaacttcggaaaagaatattatggcgcaaactttgcgcggcttcgagaaataaaggcgaaatatgcccccgaaaatgtatttcgttttccgcaaagcatcccgccatctcgttaaagtttattaaagacagaatcaatgactcatactaaaaagcacttgaatggtttccggtatcttgtctgtcggggtgcgaatcccttcagtgcgtccaatcaaacaacaggaaagacaatggtttggcaacttgccactcttgtcttttttgttttgtttcatttcataaatcttttccgctgaaacataaatgttcctccgcttgggcacgttatgaaatgtgcaatattgaatatgggaggagaatgagcatgggtattttaagcggaaatccgcaggatgaaccgatgcattacggtgaggtattcggcttgtggagttatgtgatggcgggcaataaaatggtcggcaattaccaaatgctattgaatcatgtcggtgatgacgacctgaagaagctgcttcgtgagtctattgagaaatgccaagatgaaatcaaacaggtcagcacgatcctgaaagaaaacggggtggcgctgccgccggcttctcctgaaccgccgacagcagatcttaacgatattccgcctggtgcacggtttctcgatccggatgtggcggcttccgcggcagcagaaaatgctgcaggtcttgtgacatgcagcaaaatgatggggcaatcgattcgtgaggatattgccatgatgtttgggcaatttcatatgtcgaaagcggcaaccggcgcaaaatacttaaggctgctaaaaaacaaaggctggctcatcccgccgccgcttcatcttcaaaaacatcacgaagcttaatggcaaaggcatatacagctgtatatgccttgattttatgaagatgacgtaagacgcaggccgatgacgccggctaggataaggcaaagtgaaatcacctgtgaaagctgaaaccgctccttaaaccagatgagcccgaccgccgaaacaccaatgcttccaatgccagtccagacggcatatgcgactccggcaggcaggacgatcatcgcttgggacaggcagtaaaaggataagccgaatccaacagtcatcacaatgatcggccatttttttcttgttccgtctatatatttcatggcaatggcagctataatttcttctatgccggcaatcactaataaaaaccatgccattatttttcacctcccggctgagatttgctttctttcgtaaataatttcattcctaaaatgccagccagcaataaagctaaaaagaacatttgggctgctgagaaggattcgcccagaacaattccagtcagatatgttccgacggttccgattcccacaaacacagtgtacgccgcggccatcgggattttttgataagagcggatcaacaggataaagctgaccgcgattaagataaaaatgatgatccaatccaaaagcgaatcggcatgtttgagggaagaggcccaaacaacctctaaaagccctgcaataaaaacaagaacccaattcaaatgaaacacctctctattttatgaatgaacgtcagtcatttttagggcattaaaaaatgagcggtgttacccagtcattttttaagcagtacctaagctccgttttaagaaagtgaaaatttcctttttatacacttcaacattttcatcttgttcaaatccgatatagaatcgttccgcagtattctcgaccaagttgataatcgttctggccgtccattttgaattgattccttccgttacctcatggtttgcaatggccttgttgatgattttttcaagccaggaataataaggctgatagatcgtctcccatttttccatggagtggtcgatcgcaagcccggaataacagaggacaataatatccttatggcgttctgtaatgagaaatgtctcatcaattaatatatctaaaacggtccaaaaatcctcgtccccatggagcctacctttgatttgatcaagtgtatgggtgaggagattttctgcaatggccggtatgagggcatttttagatgaaaaatacaaatagaatgttccttgggcagtgccggcctttttgacaatatcagaaatagaagctttgtcgaggcctttttcagaaatgacttctatggccgcctgcaatattttttcgtatttacccgatgtttgttttggcatgaggaacacctccagtaatgactgactctcattcattttatcgcgtgtatgtttgtttgtaaagaataaagaagcaagaaaacctcttgcttctttatttatcataatcaatggcggcttttgggagcccggtatactttgcccagtaataaatcgcaagtgagccgatcgcgactaaaatgaggtcgacgggattgctgataatccctaaaccatgtccgaaagaaccgatgtaggaaaagatcagcatcataatataaaacccgataagccaccaggctgatttcagctgctgagcaaggctgacatcttctttaggcgtatatttgctgaaacagagatagatcaaaaacatcacgagttgtgaaccgagcagccaggagactgttttccatcctgaccagtacacgataaacgctgtaaatataaaggaaagcggcccgataatgctcattccctttaaataaaacggcctgtttaagtccttcgcgttgaccctcagcgcagctgaagaaatgggtgcaatcgcatatgaaagaatgagcgcgactgaacagacattgacgagcgcgttccacgaaggaaagggaagtgtccagaaaatggacagggcaaacgaaagccaaagcgaagcgcggggtgtccccgtatctttattgacctttgagaatatgccaaataatgtgccgttacgcgcccaggcgtaaacaaggcgggatgtcgtattcataaagatattcccgtttcctccgggagacagaatggcgtctaaaatgacaagcgttgcaagccagcctaacccgagcatgaccgcaatatccttaaacggcaatgagaactcccggccaattgccggccagccatgtttcagtgtttctgtcgggattgcaccaataaaggtgacctgcaaaacagtataaatgatggttgaaacgatgatgcaaatgattaaagcgatcgggatattgcgttttggattttggacttcacctgctacagatacaatcggatgcaggccgagatacgcaaacatgacgccgcctgtcgagatggcagcctgaatacctgtaaatccaaacggtgcaaatccttgaacggataaattctccggctgaaaatgaaagatcagcacaataatgatggtaatcggcacaatatatttaaaaatcgatatgatgaaattcgccttagcgaaggttttgacgctccaataattcagcaggaaaaacaagcataatagggcaaactgcaagatccagccggaaatggtaggcgaatcagaccctttaatggtcaggccgggaaaccaataggccacatactggcgcacagctgtcacttcaattgaaatcaagcttgtataagcgacaatcgtgacaaacgaaattaagtagccgacaaggtggccatgtgaataaacggggtatcgaatgatgcctccggtacggggcagagcggctccgagctccgcatatacaagcccgattaacaaaataatggctcctccgaggatccaggaaaaagcgccggagggccctgcttttgaagcgacattactgacagcgaacagccacgctgatccaaagatggctcccatcccaatcaaaatcagatcaaacagcgacattgatttttgaaaatttccttgtttagacattcgcttcctcctttgaaaccagccttatattccttacaatgcccaatatgtaacagagaataccgctcctaataaaaaaacaggggcagcctgcgccgcccctgtttttattcatgaatcgaatcaaagtgtttcactgttatatttttgaaggaggctgtgccgccgtcagaataaagggtaattcctttatcttcaggctttgggaagacttcatttgaaaaaacggttttcccgtcgccaacaaatacttctatcgttgttttatcgacaagtattttcaaatgcaccttacgtttgtttacatcataaggagctttgctttcgacataggtattgcttttgtcaggctgatttgtggctgctctattgacataagcatagccgccttcagcgaaaatgccgacatcaatatggcgtttttggtcttctgattctctgagcctgacgcctgcattctttagctctgaccaagaaagatccgtatcaagctggtacgtatcacctgttatcgacaatgtttttgatccgttcacatcctgatcctctatttcgtcagttgaaacagtcagctgctccaaagcttcaatcggctgtgagacgaggctgtatgttccatcctgctccttcagccggagttcgcgtatgacagaatctgtgccgttaaagccgttcttcattgtcggggtgttgttggcataatcccaattgttcatccaggcaagcgcataccgcttttctaatggatctgtgcttttgctgtcttcgaacgtcacaccgccataccagtcgaagccatagtcaagccattgggcttcagtctgatccgctttgaattcttttccgtcgaagcttccggtccagtaggcgtacgtatttggtttgccccacggtttgccattcgcgctggcaccgagaacccacttattcgttccgtcgcttgcccgcatcatgtagaggtcgggacattccaccattcccgcctgttctgggaagaatccgcttgtgtaatgccagtccttaagattatcggattcataaaagccgatttttgatccttcagccatgaccatgacccatttgttatcttggtcatcccatatgactttcggatctctgaaatcgtctgtgcccggattaggcataacggggttgccactgtagaatttgaatgattttcccttatctgtgctgtaccacaaatattgttcctgttttttgtctttggctgagggctgtgtcacaatcgcgacaagcgcatttttcccgaagccggctgtgttctctttatccaccacgacggaaccggtccaaatatcaccgtccgggtttgtatatttcggaatcgccacgccttcatcggtccagtgcaccaaatcctctgagacggcatggcgccattctgtgccgttgccttttgggtaatcccggttatatagatagaaataatgatacttgccatcaaaatagatcggtttttgagggtcatttttccatttatccggcgtcgtaaaatgatatgccgcccggtagtccggcttctgttttgattttgttttttggtcatgttcttcttttggaaataagtcgataaacagcaatattcctaaaaaggttaggaatacggttagccatttgcctgcttttatatagttcatatgggattcacctttatgttgataagaaataaaagaaaatgccaataggatatcggcattttcttttgcgtttttatttgttaactgttaattgtccttgttcaaggatgctgtctttgacaacagatgttttcttgcctttgatgttcagcaggaagcttggcgcaaacgttgattgtttgtctgcgtagaatcctctgtttgtcatatagcttgtaatcacgacattgtttcctttcgcttgaggtacagcgaagtgtgagtaagtaaaggttacatcgttaggatcaagatccatttttaacacaaggccagttttgttcagcggcttgtatgggccagttaaagaattagaaacataaccaagcatgtaaatatcgttagacgtaatgccgtcaatcgtcatttttgatccgcgggagtcagtgaacaggtaccatttgccgttcattttaaagacgttcgcgcgttcaatttcatctgttactgtgttagatgcaatcagcggtttcatcacttttttcagtgtgtaatcatcgtttagctcaatcataccgagagcgccgtttgctaactcagccgtgcgttttttatcgctttgcagaagtttttgactttcttgacggaagaatgatgtgcttttgccatagtatgctttgttaaataaagattcttcgccttggtagccatcttcagttccagtgtttgcttcaaatactaagtatttgtggcctttatcttctacgtagtgaggatctctcagcgtatggttgtcgcctgagctgtagttgccttcatcgatgaactgctgtacattttgatacgtttttccgtcaccgtcaaagattgatttataatcctctacaccgttgatgttcaaagagctgtctgatgctgatacgttaacttgtgcagttgtcagtgtttgtttgccgtaatgtttaccggagaaatcagtgtagaataaacggatttttccgtcagatgtaaatgtggctgaacctgaccattcttgtgtttggtcttttaggatagaatcatttgcatcgaatttgtcgctgtctttaaagacgcggccagcgtttttccagctgtcaatagaagtttcgccgactttttgatagaacatgtaaatcgatgtgtcatccgcatttttaggatctccggctaatgcaaagacgatgtggtagccgtgatagtttgcgacagtgccgtcagcgttttgtaatggccagctgtcccaaacgtccaggccttttgcagaagagatatttttaattgtggacgaatcgaattcaggaacttgatatttttcatttttttgctgttcagggatttgcagcatatcatggcgtgtaatatgggaaatgccgtatgtttccttatatggcttttggttcgtttctttcgcaaacgcttgagttgcgcctcctgccagcagtgcggtagtaaaggttaatactgttgcttgttttgcaaactttttgatgttcatcgttcatgtctccttttttatgtactgtgttagcggtctgcttcttccagccctcctgtttgaagatggcaagttagttacgcacaataaaaaaagacctaaaatatgtaaggggtgacgccaaagtatacactttgccctttacacattttaggtcttgcctgctttatcagtaacaaacccgcgcgatttacttttcgacctcattctattagactctcgtttggattgcaactggtctattttcctcttttgtttgatagaaaatcataaaaggatttgcagactacgggcctaaagaactaaaaaatctatctgtttcttttcattctctgtattttttatagtttctgttgcatgggcataaagttgcctttttaatcacaattcagaaaatatcataatatctcatttcactaaataatagtgaacggcaggtatatgtgatgggttaaaaaggatctctaactgaaggatttttcaaaatatttgaaacgttagtaggttagtaacgtacagagatatgggaggtggaggaatgaagcagaataaaagaaagcatcttcagacgttatttgagacattaggcgaaaaacatcagtttaacgggacggttctggctgcggagggtggcgatattttatatcaccactcttttggctatgcggaaatgacggaaaaacgcccgttgaaaaccaactctttgtttgagttagcgtctttgtcaaagccttttacagcattgggaatcatcttgctggaggagaaggggattcttggctatgaggataaagtggatcgctggctgcccggttttccgtatcagggcgtaacgattcggcatttattgaaccatacgtcagggcttcctgattatatgggatggttttttgccaattgggattcacacaagattgcggtgaatcaggatattgtcgatatgctgatgaatgaggggctatctggttattttgaaccgaatgaaggctggatgtacagcaatacggggtatgtgctgctggcggttatcattgaaaaagcatctggcatgagctatgcggattttataaaaacaagtatttttttaccggcaggcatgaatgaaacaagagtgtataacaggaggctttcgcctgagcgaattgatcattatgcatatggatatgtgtatgatgtacattccgaaacatacgtcctccctgatgagctggaggaaacgaactatgttgtgtatctcgatggcatacagggagatgggacggttaactctgtcacaagcgatttgtttcgatttgatcaggctttatatcaggacgatttcatcagcaaggcttctaaggaatctgcgttttctccagtgcgcctcaacaatggagaaacaattgattatggctttggctgggtgctgcaaaacagtcctgaaaaagggcggattgtcagccacagcggaggatggcccggctattcgacgatgatgatccgatatatcgatcatcgtaaaacgctgatctatttgagtaataaggaagaggatactgaatatgaacaagcgattctgaaggcggcggaacatattctatttggccagccatatgatgtcccggaacgtcctgctgataaaaagaaaaaagcaattgatacggcgatatacagccgctatgttggcagctacctgttgcaggatgggacggctgcacaggtgacaaccgagaatgaacggctttatttggagatcgccggacagctgagactggagttatttccttcctcggaaacccgtttctttctgcgagcattgtctgttgaagtcgagtttacattaggtgaggatgctgcgaaaagctttatcctctatgaggatggctcagaggaagaagcggtccgtacgaagtagaaaggaatgaatttgatgatcggaatattagccggaatggggccgaaatcgacctcgccgtttattgataaggtgattgattactgtcagaagctgtatggggcttcaaacgatattgactatccgcacatgatgatctattcatgcccgacgcccttctatgcagatcgtccaattgaccatgacgagatgaaaaaagcgattatcgacggagcggtaaagctcgagaaaacaggcgtggatttcattgcgctgccttgtaatacggcgcatgtctactatgaagagattcagcaggcattgtcagttcctatgttgcatattgttgaggaaacgataaaagagattccgcatcccgcaaaaaaagcggtggttttaggaacagagccaaccatccaatccgccatctaccaaaaagttctgaagggaaatggacaagaagttattcacaaggaccattggcagcaggctgtgaaccagcttatcgccgcaatcaaacagccaaatcatatgcagcatacacaagcattgtggcagacgctatatgaagaaatcagtcagcatgcagacatcatcatttcagcctgcacggatttaaatgcggtgttagatcatattcaaagtgagattccgattatagattcctctgcctgtcttgccaaaagcactgtcagcacatatcttgcttatcaaagctagcttcagacaaggactgtcttcaaacagtccttgtttttttatgttcctattgtttgacagttaactgcaatggtgttaaagtgaacatgtaaatagttacatgattttttctgaaggtgaggtggttctcgtgaagaagccggttttaaaaccattcgcctctttagaaatcaaggttgatccgcctatcacgattggtgagacaagcctgggactgagatgattcattccgattcgttcgggaacaataaccggggaagtaaagggacgtattttgccgggcggtgccgattcacaaatgattcgcgctaacggcagaacagatttatctgccaggtatgtgattgaaacagcagatcatgaactgatttacattgaaaacaatggaatacggcaagtcagcaagccgtttcgaaaacaagcggcagccggggaaattattgaaccggagcatgtttattttcgtacggtaccgacgtttgaaacaggcagtgaagtctatcaatggctccatgaccgcttgtttatcggttccgcagaaagaacccctgattacgttctactagacatttatgaagtacagtaaaagactaaggagagtgtgtaagatggaaaactttatcggaagccacatgatttatacgtatgaaaacggatgggaatacgagatttatattaaaaacgaccatacaattgattatagaattcatagcggaatggttgccggacgctgggttcgagatcaggaagtgaatattgtcaaactgacagaaggcgtatataaagtgtcttggacagagccgactggcacggatgtttcattaaactttatgccaaatgaaaaacgcatgcatggcattattttcttcccgaaatgggtgcatgaacatcctgaaattacggtttgctaccaaaatgaccacattgatttgatgaaagaatcccgcgaaaaatatgaaacgtatccaaaatacgttgtacctgaatttgcggaaattacatttctgaaaaatgaaggagtcgacaacgaagaagtgatttcgaaggctccttatgagggaatgacagacgatattcgcgcgggaagattataataaacataaaaacccggaaaagagaattacttctcttttccgggttttctttttgctgagtatgcgggaaccatcacaattcccgcgaaaaacagtatgatgccagtccagcgcataggctggtaatagactgtgtcccgtaaacataccacggccgacaaaataatgatacaagctgccacaacaatggcagcaccaatgtatcctgttttccccatatttattctccttttgaagggaatagcttctgccttttttcagattcgggatcgttttcgatcgtaatctctgagtctaaaatcagcgtctctctcgtttcttcatgatacgcaggccaattcacagcttcggtgcttgggtttcctgttttggcgaacgtgatccacgctgattgtatcgtgtgagaaagctgtttcacctcatccgtaatctccgcttttgccattcgttccaatccgtccagatttccaaagacaaaaggaagctctaatgcgtgaaacgctttattgtacggcggcttcttcgggtgccaatcgaacctgtacatccagacaggggcgtaatgagactgtgcggatgcataggcgacggcagggcgccaaaataataaatcagtcatcatatgaatttggctttccagagaacgcggatacaaatcggcaactttctctgccagcggcttccctagtaaatactcgagcgctgcatcaagcgtttcctgagaatgaacgtctgaatccggggtgaaaaataaatatccttcatcacgggttgttccaattaatagcggaataccggaagcagccccttctgcgatcgctttttctggttcttcaggcagcgttttcggatcaagggcgggctggaagaacagctgaaagatattttctttttctgcaatccgaagctgatcagccgcttttagcaaatcttccgcagaaaccgtatgcaatttatccagttggccctcgttaatcccaaggacctgtaaaaaggctgccgaggtgctcgccgcttgttctttcgtcatcgttcgagaagcgccgctttccatgattgctttctggaacaggccttttgccgcaggcatagcaagcagcgcggcaatgctcatcccgccggcggattctccaaatactgttacgttatcgggatcaccgccaaacgctgaaatattctctcgcacccatttcagcgcggcggcttggtctaaaagcccaaggttatcagaatacgcctcattaaatgaagacaagtgcaaaaagccaaacggccccagccgatagttcaatgtaacgacaatgacttctccctgtgccgcaagttttgatccgtcatacaatggctcactgcccgctcctagataaaaagcgcctccgtgaatccacaccatgacaggaagatttttacttggggtgtcaggcgcaaatacattgacatacaagcaatcctcggactggcggggcagctcagtatacgaaagtgacagcaaatcagacggctgcgggcaaatagagccgtacgctgtggcatcaagcacatcttcccacacttcaggcggctcaggtgctttaaaacgccattgtccgacaggcggcttggcataggggatgcctttccacttatgtacgccgttttccgttgtgccttttactttgccgtattgagtcgttactatttgatgagtcattgtgttctctccctttttcccccattataaacagatttcccctatagatgcgaacgttagccctttaaccgatcatcatcttccctttgtttttaaaaaggatttgacttcatggacagacaagccgatttctcttgcctccgccatcagcgctttccattcttctatattggattccgtcagtttgcggttgcggtaagaggcagtttcaggctgttctttcttgagtctgttcgtaaaagtgaacaattcttccttttccatcccggcttgtacggcttgcactaaatgtacgcgccattcttcttcaccgccgctgattttttcatacatcattgtttctgcgtcaaataattctgttaattcaacttccagtgtggcagaaactttttttaaaaattgaacggacggattcgtgtgaacgcctctttcaatcttgcttaaataggatttggatacgcctgactcaacagccagctgattaatagaatagccttttcttttacggtacaaacggataattcttccaatcataatatgaaattctcctctattcctgtcgttatttcgttcattataaggaatttttcgttctttataaaatttaaaataataagggaagtgcagtaaattagaggaaaatcatgattttgttctctaaagagaacttattggcttattttgcaatttttaaataataacgttttcttttataatccaatcattaacagaaaggggcgcgggaagccagccgcgggaaggctgaaggctatgaatacatgaatgagaatatgagtttcaaagaattatatgcgattgtcagacacagattcgtgctgattctgctcatcacaatcggcgtcacccttattatgggttttgtgcaatttaaggtcatttcaccgacctaccaggcgtcgacacaggtgctggttcatgaatcagacggtgaagaaaactcgaatctcagtgacatccagcgaaatcttcagtatagcagcacgttccaatcgattatgaaaagcactgccttgatggaagaagttaaggcggaattgcacctatctgaatcggcttcctcgctgaaaggaaaagtggttaccagcagtgaaaatgaatcagaaataatcaacgttgccgttcaggatcacgatccggcgaaagcagctgagattgcgaacacgttagtgaacaagtttgaaaaagaagtagatgaaagaatgaatgtacaaggcgtacatatattatcagaggcgaaggcttcggaaagcccgatgatcaagccggccaggctgcgaaatatggtcatggcttttggcgctgctgtcatgggcggcattacactggcattttttctgcattttctcgatgatacatgcaaaagcgcacggcagctcagcgagagaaccggattgccatgcttaggctccgttcctgatgtccacaaagggcggaatcgcgggataaaacatttcggggagtgaagcgagtgatctttagaaaaaagaaagcaaggcgaggtttggctcaaatatctgttttacacaataaatcagttgttgcggaacaatatcgcaccattcggacaaacattgagttctcatctgtccagaccaacttgcgatctatcctcgtcacctcctctgtgcctggtgaaggtaaatcgttcagtgcagcgaatcttgcggctgtctttgcgcagcagcaggaaaagaaagtactgctggtggatgccgatttaagaaagccgaccatcaatcagacgtttcaggttgataatgtaaccgggctgacaaatgtgctggtcggcaatgcttcactcagtgagacggtgcaaaagacgccgatcgataacttatatgtactgacaagcgggccgaccccgccaaacccggcagaactgttgtcttcaaaagcaatgggagatttaatatctgagatctatgaacaattcagcctcgtcatctttgattcccctcctcttttggctgttgcagatgctcagattctagcaaatcagacagacggcagcgtgctcgtcgttttaagcggaaaaacaaaaaccgataccgttctgaaagcaaaagatgcactggaacaatccaatgcgaagctgttaggcgctcttttaaacaaaaagaaaatgaaaaaatcggaacactattcctactagtttttgtaaaggtgatgtctcctgacctgtatcaatggaggcactcggctctgctgtgggcagctgaagttgctgccttagatgctggtcgtcgctggcggggcgtgaggatgggttaaatgcccacttatctcatatatacataggacgtattgtcggtttagctgctgccgattttttggagagacgaaaaccgccgcagctaaaccgataaaagaattaggggggaaaaggttgagttaccggagaagactgtcaatgattattgcgctggatacttacctcgttttaaattcagttattgcaggatatcaatttttaaaagattcctatcaattttatgactccggagcattactgcttaccgctgtcagcttgctcctcagctatcatgtgtgtgctttcctgttcaatcagtataaacaggtgtggacatacaccgggcttggcgagctgattgtcctgcttaagggcattacgctttcagccgctgtgaccggcgtcattcagtatgctgtgtatcacacgatgttcttccgtctgttaaccgcgtgctgggtgcttcagcttttgtctattggagggacccgtattttatccagagtattaaacgaaagcatcaggaaaaaacgctgcgcctcgtcccgcgcgctgattatcggggcgggctcaggtgggactctgatggtcaggcagctgctttcgaaagatgaacctgatatcatacctgtcgcttttattgatgacgaccaaacgaagcataaattagaaattatggggctgcccgtaatcggcggaaaagaaagtatcatgcctgcggtgcaaaagctcaaaattaattatattattattgccattccttcactccgcacccatgagcttcaggtgttatataaagaatgtgtgcgaaccggagtaagcattaaaattatgcctcattttgatgaaatgctgcttggcacacgaactgccggacaaatcagagatgtaaaagctgaggacttgctcggcagaaagccggtaaccctcgacactagcgaaatttcgaaccgcatcaaaggaaaaacagttctcgtcacgggagcgggcggatcaatcggctcggaaatctgccgtcagatcagcgcgtttcagcctaaggaaatcattctgctcggccatggggaaaacagcattcattcgatttatacagagctgaacggacgattcggcaaacacattgtgttccatacggaaatcgctgatgtgcaggaccgcgataaaatgtttaccttgatgaaaaaatacgagccgcatgttgtctatcatgcagctgcccataagcatgtgcctttaatggaacacaatccagaagaggcggtcaaaaacaatattatcggaacaaaaaatgtcgcggaagcagccgatatgtcgggaactgagacattcgtgctgatttcatcggacaaagcggtgaacccagccaacgtaatgggggcgacaaaacgattcgcagagatgattattatgaatcttgggaaagtcagcagaaccaaatttgttgctgttcgcttcggcaatgtactcgggagccgcggcagcgtcattccaattttcaaaaaacagattgaaaaaggcggcccggtgacagtaacacatccggcaatgacccgctatttcatgacgattcccgaggcatcaaggcttgtgattcaggctggggcactggcgaaagggcgtcaaattttcgttctcgatatgggagagcccgtaaagattgtggatcttgccaaaaacctcattcatttgtccggctacacgactgagcaggttccaatcgaattcacaggcattcgtccgggcgaaaaaatgtatgaagaattgctgaacaaaaatgaagtccatgctgaacaaatctttccaaaaattcacatcggtaaagcggtggacggcgattggccggtgctgatgcgctttatcgaggattttcatgagctgccggaagccgacctgagagcgaggctgtttgcggcaatcaatacatcagaagaaatgacggctgccagcgttcattagggggagtgaaaatgacgaaaaagatattgttttgcgcgactgttgattatcattttaaggcctttcacctcccttattttaaatggttcaagcaaatgggctgggaggttcatgtcgccgcgaacggacaaaccaagctgccgtatgtggatgagaaattctccatcccgattcgcaggtcaccttttgaccctcagaacctggccgtttataggcagctgaagaaagtgattgacacttatgaatacgacattgtccattgccatacaccggtcggcggcgttctcgccagactggcggcgaggcaggcacggcggcacggaacaaaggtgctgtacacagcgcacggatttcacttctgcaaaggggcaccgatgaaaaattggcttctttactatccggttgagaaatggctttcagcatatacagactgcctgattacgattaatgaagaggattacatacgggcgaaaggacttcaaaggccgggcggaaggacgcagaaaattcacggcattggcgtcaataccgagcgtttccggcctgtcagtccgatagagcagcaaagactcagagaaaagcacgggttccgtgaagatgattttatattggtttatccggctgagctcaatctgaacaaaaaccagaagcagttaattgaagccgcagccttgctaaaagaaaaaattccctcactccgccttgtgtttgccggggaaggggcaatggaacatacgtatcaaacgttagctgaaaagcttggtgcctccgcccatgtctgtttttacggcttttgcagcgacatacatgagttgattcagcttgcggatgtatctgtcgcatccagcattagagaaggcctcggtatgaatgtgcttgagggaatggcggcagaacaaccggcgatcgccacagataatcgcgggcatcgggaaatcatccgcgacggagaaaacggttttctgatcaaaatcggtgacagtgctgcttttgcccgccggattgaacagctttaccataagccggagctctgccgaaagctgggacaggaaggccgaaaaacagccttgcgcttctcggaggcgcgaacggtggaagaaatggcagatatttattccgcgtacatggatatggatacaaaggagaaaagcgtatgaactcaggaccgaaagtttctgtcattatgggcatttataattgcgaacgcactttggcagaaagcatagaatccatactcagccaatcctataaaaattgggagctgattttgtgcgatgatgcgtcaacagacggcacgctccgtatcgcgaagcagtatgccgctcattacagcgaccgcatcaaactgattcaaaacaaaacaaataagcggcttgccgcatcattaaatcattgtctttcgcatgcgacaggcgattatatcgcacgtcaggacggagatgacctttcgtttccgcgccgtctggaaaagcaggtcgcgtttttagaaaagcaccgacactatcaggtggttggcaccggcatgcttgtgtttgatgaatttggcgtaagaggcgcccgcattctgccttctgttccggagccgggcatcatggcaaaagggactccattttgccacggcacgattatgatgagagcgagtgcctaccgcacgctgaaaggctaccggtcggtgcggcggacgagacgaatggaagatattgatttgtggcttcgcttttttgaagagggcttcaggggctataatcttcaggaagccttgtataaagtgagggaagacagcgatgcattcaaacggcggtcatttacgtattcaatcgacaatgccattcttgtctatcaggcgtgcagacgcttgaagcttcctttatctgattacatatatatcgcaaaaccgttaattcgcgcctttatgcctgcagctgtgatgaatcgctaccataaaaaaagagtgatgaaccaaaaggaagggcttgtcaagcatgaatagcagccaaaagcgcgtgctccatgttctcagcggcatgaacaggggcggcgcggaaaccatggtaatgaatttatatcggaagatggacaaaagcaaagtgcaatttgattttttaacgtatcgaaatgatccgtgcgcttatgatgaagagattttatctttaggcgggcggcttttttatgtcccgagcattgggcaaagcaatccccttacatttgtgaggaatgtgagaaacgcgataaaagaaaatgggccgttcagcgccgttcatgcgcacacggatttccaaacgggttttatcgcccttgcggcaaggctcgccggagtgccggtcagggtatgccactcccacaatacgtcttggaagaccggcttcaactggaaggatcgattgcagctgctcgtgttcaggcggctcattttggcaaatgcgacagcgctgtgtgcctgcggagaggatgcgggcaggtttttatttggacagtccaatatggagcgggagcgtgttcaccttcttcctaacgggattgaccttgagttgttcgccccaaatgggcaggcggctgatgaagaaaaagcagcacgcggcattgcagccgaccggctcatcattggccatgtggcccggtttcatgaagtgaaaaaccacgcgttcctgttgaagcttgccgcacatctcaaggaaagaggcattcgctttcagctcgttctggcgggagacgggccgttgtgcggggagatagaggaggaggcgcggcagcagaatttgctatcagacgtcctctttttaggcacggaagaacggatccatgaactgatgcgaacattcgatgtatttgtcatgccgtctctgtacgaaggcttgccggttgtgcttgtggaagcgcaggcgtcggggcttccatgcatcatttcagacagcattacagaaaaagtcgacgccggtctcgggcttgtcacaagattaagtctttctgagccgatcagcgtctgggctgaaaccattgcaagggcggccgccgcaggcaggccgaagcgtgagttcatcaaagaaacactcgctcaacttggctacgatgcacagcaaaatgtaggagcgctgctgaatgtatacaacatcagcacggaaaaggaccataaccgatgattgtatatgccgtcaatatggggattgtatttatttggtcttggttcgctaaaatgtgcggcggccgtgatgattcgcttgccacggggtatcggccgaataagcttttgatctggattccgctcgcttcacttgtgctcgtgtcaggtctccgctatcgagtcggcacggattttcagacgtacacgctgttgtacgaattggcgggcgattatcaaaatgtgtggcagatattcggtttcggcacagcgaaaacagcgacagatccggggtttaccgcactcctttggctgatgaatttcatcacggaagatcctcaaatcatgtattttacggtggcggtcgtgacctacagctttattatgaagacactcgccgactatggcaggccgtttgagctgagtgtctttttatttttgggaacctttcattattacgcatcttttaacggcatcaggcaatacatggtggcagctgttttgttttgggcgatccgttatatcattagcgggaactggaagcgatatttcctgattgtgctggtcagctcgctctttcattcgtcggcgctgattatgattccagtgtactttattgtcagaagaaaagcctggtcaccggcgatattcggcctatccgctttatttctcggcatgacatttttatatcaaaaatttatttctgtgtttgtcgttgtacttgaaaacagctcatacagccattatgaaaaatggctcatgacgaacacaaatggaatgaatgtgatcaaaatcgctgttttggttctgccgctgttccttgcattttgctataaagaacgactgcggagtctgtggccgcaaattgatattgtcgtcaatttgtgcctgctaggttttttgttcggccttttggccacaaaggacgtgatttttgccagattcaatatttatttcggtctgtatcaaatgatcctagtcccttatttcgtcaggatatttgatgaaaaatcgaacgctcttatctatatcgctatcgttgtttgttattttctttacagttatttgcttatgccggtcgattcatcggttctgccttacagaacgattttttcccggtaatttatgcacgaggagccggtcattatggaaacacctgcggttagtctgttagtcgctgtttataacacagaaacatatatcagaacgtgtctcgaatcactgcggaaccagacaatggacaatattgaaatcatcattgtcaatgacggttcagctgacgccagcccggatatcgcagaagaatacgccaaaatggacaacaggttcaaggtgattcatcaggaaaaccagggactcggtgcggttcggaataaaggcattgaagctgcacgcggcgaatttatcgcgtttatcgattcagacgattggattgagcctgattattgcgagcagatgctccggacagcaggcgatgaaactgatctggtcatttgcaattacgccgcagagtttgaggacactggcaaaaccatggactctgacattgcccaaacctatcaggatcagccgaaggagcactatatcaaggcgttattcgaagggaaggtcagagggttttcatggaacaaactgtacagaagaagcatgattgaagcccatcggctgtcgtttccgctccgaggcgagctggagcatgtcgaggatcagtttttcagcttcagggctcattttttcgcccgctcagtatcctacgtaaaaacgccgctctatcattatcgaattcacctttcctccattgtgcagcgctatcagaaaaaattgtttgaatcaggacttgcgctgtatgagacgaatgcggcgtttttacaggagaacaacaaactggaggagtatcgcaaggagcttgatacctttatcgttcttcacagcagcatctgtatgctgaatgaatggaaaacgagcggcagccgccggctgtttgaaaagcttagaaatgttggcgtgatatgcgcggacccggtgtttcaagaaagtctttcaaaaacgggtactgctccttttgacgcaaaacggtcatgcctgcttctgatggcgaaatacagaatgattccgttcgtcgctatggcatcggctgtgtatcagcgggtgatcgagtacaaaatgagaaacagagggtgaggacatgtcgttacaatcgttgaaaatcaattttgcagaatggctgctgctaaaggtcaaatacccgtcccaatattggctgggagcggcagatcaaccggtaaaggccgcagcacatcagaaaaaaatcatactgaccctgctgccgtcccatgacaatttgggagatcacgcaattgcttatgccagcaaggcatttcttgagcaagaatacccggactttgacatcgtcgaggtcgatatgaaggacatttacaaatcagcaaaaagcctgatccgctcgcgccatccggaggatatggtctttatcatcggcggcggaaacatgggggatttataccgttatgaggagtggacgcgccgcttcatcattaaaacattccatgactatcgggttgtccagcttccggcaacggctcatttttctgacacgaaaaaagggcgcaaagagctgaaacgggcacagaaaatttataatgcgcaccccggcctattgctgatggcgcgggatgaaacaacgtatcaatttatgaaacagcattttcaagaaaaaacaattttgaagcagccggacatggtgctgtatttagacagaagcaaggctcccgcagaacgcgaaggggtttatatgtgtttgcgcgaggatcaggaaagcgtgcttcaggaggagcagaggaaccgggtcaaggctgcgctatgtgaggaattcggcgagatcaaatcctttacgacaacgatcggccgccgggtcagccgcgatacacgcgaacatgaacttgaagcactgtggtctaagctgcaaagcgcagaagccgtcgtcactgacaggcttcatggcatgattttttgcgcgctgacaggaacgccgtgtgttgtcattcgctcctttgaccataaggtgatggagggctatcaatggcttaaagacatcccgttcatgaagctgatagaacatccggagccagagcgcgtaacagccgcagtcaatgagcttttaacaaaagaaacatcccgtgcaggctttccgagagatgtgtattttaaaggtctgcgtgacaaaatcagcggtgaagcgcaatgatcccgctcgtcagcattattgtcccgatgtataatgttgaaccatttatagaagagtgcattgattctttgcttcgtcaaacgctttctgatattgaaatcatcctcgtgaatgacggaacaccggatcgttcaggcgaaattgcagaggactatgcaaaacgggatgcgagaatccgggtcattcatcaggcaaacggcgggcttagttcagcgcgaaatacgggaataaaggccgcgcggggcacttacatcggctttgtagacggagacgattatgtatcatccgccatgttccagaggctgactgaagaagcggagcaaaatcagcttgacatcgtcggatgcggtttttacaagcagtcatcggacaggcggacatatgtgccgccgcagcttgaggcaaaccgcgtgctgacgaaaccagaaatgactgaacagcttaaacatgctcacgaaacgagatttatctggtatgtatggcgttatctttaccgtcgtgagctttttgaaagggcgaatctgctgtttgatgaagacatccgttttgctgaagactctccctttaatttgtccgcttttcgcgaagcggagcgggtgaaaatgcttgatgaaggattgtacatttatcgtgaaaacccgaacagcctgacagaaatcccttataagccggcgatggatgaacatcttcaaaaacaatatcaggctaaaatcgcattctacaatcactacggcttagcaggcgcatgtaaagaagatttgaatgtgtacatttgcaggcaccagcttccgatgcttttggcaaatgcctgtgcttctccgaattcgccgaaagacatcaaaaagaagatcagacagattttatcctatgacatggtgcggcaggctgtcagacatacaccgtttcagcatgagaaattattaagaggagagcgtttggtattagcactgtgtaaatggcggctcacttttctcatcaagctgtttttcgagcagcgggggacaatgaaaggcagtgcgaagcaggcatgaaattcacgataaatttcagcgcgaatctcacggcttttctcttgtctgttttcctatcggtttggatgacgccttttattgtcaaaacgctcggtgtcgaagcgtttggctttgttcacttgacacaaaatgtgattaattacttttcggttattaccgtggcgctcagctcggttgtcgttcggttcttttctgttgctgcccacaggggagagcgggagaaagcaaatgcgtatatcagcaattatttagccgcctctgttttgatttccttgctgctcttgctgccgcttgcgggttcggctttttttattgaccgcgtcatgaatgtgccgcaagcgcttttggcagatgtgcgtttgtcgattttaatcggcagtgtgctgtttattttaacgtttctgatggcgggcttcggcgctgcaccattttatgccaaccgcctttatatcaccagttccattcaggcggtgcaaatgcttatacgggtgctgtctgtgctgctcctgtttgcatgctttgcgccgaaaatctggcagatccagcttgcagctttagctggtgctgttattgcgtctgtgctgtctttctatttcttcaaaaagctgattccgtggttttcgtttcgtatgaaggatctttcattccgtacaagcaaggagctgtttcaagcgggcgcatggagctccgtcaatcaaatcggcgtcctgctttttttgcagattgatctgttaaccgccaatttgatgctgggggcgtctgcatccgggaaatacgcggcgattatccagtttccgctgcttttgcgcagcttggccggaacggtcgcatccctgtttgcgcccatcatgacttcatattattcaaaaggcgatatggaaggattgatgaattacgccaataaggcagtaaggctcaatggtcttttgcttgcacttcctgctgccttattgggcggattggcgggaccttttctgacaatctggctcggaccgtccttttcaacgatagcaccgcttttatttattcatgccggatacttggttgtcagcctcgcctttatgccgctgttttatatatggaccgcttttaatcaacaaaaaacaccggcgattgttaccctgctgttaggtgcggtgaatgtggtgctggcggtcacgctgagcgggccggctcatctcggtctgtacggcataacattggcaggggccatttctcttattttaaaaaatgccatctttacgccgctttacgtatcccgcattacaggctacaaaaagcacgtgttccttaaaggcataatcgggcctctttcagccgctgtatttgcctggacggtctgtaaggcaattcagttcattgtgaagattgacagctggccgtcattgatagcgacgggagtgacagtcagcttttgctacgctgttttcgcttttatgctcgtttgtacaaaagaggaaagacagctggtattaaaacggtttcgaaaaacgaaaggagctgtgaatctttgatcctgaaacgactttttgatctgacggccgccatttttttgttgtgctgtacaagtgtgatcattctgttcaccatcgccgttgtcaggctgaaaataggatcacctgtcttctttaagcaagtaaggccgggcctgcacggcaaaccgttcaccctatataagttccggacaatgacggatgaacgggacagtaaaggaaatctgctgcctgatgaagtccggctgacgaaaacgggcaggctgatcagaaagctgagcattgatgagcttccgcagctcctgaatgtcctgaagggcgatctgagccttgtcgggccgcggccgcttttgatggactatctgcctctttatacagaaaaacaggcacggcgccatgaggtgaagccgggtatcacaggctgggcgcaaatcaatggcagaaacgcgatttcctgggaaaagaaatttgaattagatgtttggtacgttgacaactggtcattttttctcgatttgaaaattttatgtttgacggtgcgaaaggtccttgtttcagaagggattcagcaaaccaatcatgtgaccgcggaacggtttaccggaagcggagatgtgtcctcatgaaaaatgtggccattgtgggtgacggcggtcacggaaaggtgatcagagagctgataaacgcccgctcagatacgcgcttagccgcggtgctggatgataaattcaaaacgttcgaaggcggaaaagaatggtacacaggaccgccgaaagccgttactgaactgcgcaggctcattcctgatgtgctgtttctgattgctgttgggaataacagtgtcagaaaacagctggcggagcgactgggactggggaaagatgattttattacattgattcacccgtcagccatcgtcagcaagtcggctgtcattggggaagggacagtgattatggcgggcgcgatcattcaggcggatgcgcgcatcggcgcccactgcatcatcaatacgggtgcagtggcagagcacgacaatcaaatcagcgattacgttcatctgtccccgcgtgccacgctgtcaggagcggtttccgttcaggaaggcgctcacgtcggaaccggtgcatccgtcataccgcagatcataatcggggcttggagcattgtcggagccggctccgcggtgatccgttccataccggacagggtaacggcggccggtgctccggcacgcatcatttcttccattcaaacatcaaacaaaggatgattctatgcataaaaaaatctacttatctccccctcatatgagcggcagggagcagcactatatttcagaagcctttcgctcaaactggattgcgccgcttgggccgctcgtgaattcatttgaagaacagctggcagaacgagtcggtgtaaaagcagcagctgcggtcggctcaggaacggcggcgattcatctcgcgctgcgtttgcttgaggtaaaagaaggtgacagcgtgttttgccagtccttcacatttgtagcaaccgccaatccgattctatatgaaaaagcggtgcccgtctttattgattctgagcctgatacgtggaatatgtcgccgacagcccttgaaagagcattggaggaagcgaaaagaaacggaacactgccaaaagcggtaattgccgtcaatctatatgggcagagcgcgaaaatggatgaaatcgtaagcctgtgtgatgcatacggagttcctgtcattgaggacgcagccgaatctctcggcacagtctataaagggaagcaaagcggaacattcgggcgcttcggcattttttcatttaacgggaacaaaatcatcaccacatcagggggagggatgctcgtttcaaatgatgaagccgcaattgaaaaagcaagatttctcgcttcgcaggcacgagagccggctgttcattatcagcacagtgaaattggacataattacaggctgagcaatatcttagccggcgtcggcattgcccagcttgaggtgctggatgagcgagtggagaaaagaaggaccattttcacgagatacaaaaatgcgctcggtcacttagacggcgtccgctttatgccagagtacgcagcaggcgtatccaatcgctggctcaccacgctcacacttgataacgggctcagcccatatgacatagttcaacgtcttgctgaagaaaacattgaagcccgtccgctgtggaagccgctccatacccagccgctgttcgatccggctttattttattctcatgaagatacaggaagcgtatgcgaagatttgttcaagcgaggaatctgtctcccatcggggtccaatatgacagaagatgagcaaggccgggtcattgaagtgctactgcacttattccatactgtcgaggtgaagaaatggacagcaagcattcgatgatcagcctgaaacagaaactgtccgggctgctcgacgtcattccgaaacaatcagagattatatatgctgactatcctctatatgggaatgtaggggatttatttattatgaaaggaacagaagccttctttaaagaacacgggattcgggtcagaaaacgctggaatccagacaatttcccaatcgggcgaaagcttgatccgaatctcatcatcgtctgccagggaggcggaaacttcggggatctgtatccgtattatcaaggctttagagagaaaatcgtccaaacctatccgaaccacaaaattgtgatcctgccgcaatcgatttattttcaaaacaaagacaacctcaagcggacggcagagatattttctaagcatgcgaaccttcacatcatgacaagggaaaaagcctcctatgctacggcacaggcctattttacaacaaatcacattcagcttctgcctgatatggctcatcagctgtttcccgtcattcccacgcagcagccgtccaatcaaaagctgagatttatccgaacagatcatgaagcaaaccaggcgcttcaggaacacgcagaagcggaaagctacgactggcgcacggtgctgtcagcttcagaccgccggacgattgcttttctccaaacgctgaacgtcttgaataaaaaagcaggcaaccctttgcccattgcgtatatatgggaaaaatactcggattatatcgtccaaaaagcgattcggtttttcagccgttacgaatcggtggaaacatcaaggctgcacggccacatcctgtcttctcttcttcaaaaagaaaacacggtcattgataattcctacgggaaaaacgccaattactttcatacctggatggaaggcgtgccaagcacccgtctcatccagcacgcctcaaagaaggaaaaccttcctgctcacatgtgagcggaaggtttattttgattctccacgtttgactttgttgtatgcttcatctaaatgctgaatccgtttcaggacaactgcgtttttcgtcagctggtcctgcactagtgttgagacgacggaacggtagtagctgttcatcgcgtggattttatcctcagactgattcatttcaatatgctgttttaaattctcaataaaataagggacggaaaaaagttcagacatttctttggcagctcctttttcataaatgtatacggtgtgatctcaatcatgtacaatgaagaaaggggagtgagcaagatggatatgaaacttcagcaagtacaagtattaaagcctcaactgacacaggagctcaggcaggccatcacgctgcttggctatcattcggcagaactcgccgagtacattgatgagctctcactggaaaaccctcttattgaacgaaaggaaacagacacaccgccactatcttaccataaaacaaacaaaaacaggatgaatgcacaggaagcgggccttcaattaagtaatccgcaaaaaacattgcaggatgcgttaaaacagcagtcactcgatatgaatctgacaaacactgaaaaaaagatttttaattatctgattcattcgcttgattcaaacgggtacttggaagaagatatagaggaggcagcacggcgattatctgtatcggccaaggaagcggaggctgttttggcaaaactccagtcgttagaaccggctggaatcggcgcgagatctttgcaggaatgcatccttcttcaattacagcggctgccgaacagaaatgaacaagcggaaatgctggtttcagctcattttgatgcttttgcgcaaaaaaaatggaaaacgctttcagtagagacgggaattccgcttcataccattcaagatatctcagatgatatcgcggctcttcatcctagacctggccttctgtttgcccggccagagcaagatgtgtatattgagcctgacatttttatcaccgtaaaaaatgggcacatcgcagcggaactgaatacccgctcgtttcccgagatcgatctgcatccgcagtacagaacgcttttatcatccggctcctgtcaggatactgtctcctatttatctgcgaaatatcaggagtggcgctggctgagccgcgcgctgcggcagcgaaaacagacaatcacgagaattatcaatgaactgatcacacgccaaaaggatttctttctgaaagggcgaagcgcaatgaagccgctgactctcagagaggtggcagactgtctaagccttcatgaatcaactgtgagccgggccattaaagggaaaacaatacaaacgccttacgggctgtttgagatgaaactctttttctcagcaaaagccgaggcttcaggtgatggagatgcgtcgaattatgcagtcaaaacgcatctggaaaacctgatcaatcaagaggacaaaacaaaaccgctttcagaccaaaagcttgtcgatttgctgtatgaacaacacggcatccaaatctcgagacgcaccgtggcaaaatatcgcgatcaaatgaatattccgtcatcggcagcgagaaagcgatataaataaaatcctccctagacgggaggatttttttaaggaatcatccagctgaatacgtgatgctgcaaaaaggtgatgatacagacgagcagcagcaaaaacagactgtgtttaatggtaaagcggaaaagatctgactcctttccggcgagtcctaccgcggcgcacgccaccgctatcgactgcggtgaaatcatttttcctgtgacaccgcctgaagagttggcggccacagacagaacggggtccatgccgactgataatgcggtgactttctgcaggttgccgaacagcaggttggcagaagtatccgagccggtaatgaagacgccgagccagccgagaacgggcgaaaagaaggtaaacatcgaacctgtcagcgcgagtgtcatcccgagtgtcgtgctcattcccgaggagttggtgacataggcaaaaccaacgacagaagcaatggtcaaaatcggaagcttcaattcctggactgtttctttaaaaacggttccccagtctttccacgaaatcgccgtgatgaattttgacagcactgcggcaatcaatatcgcggtgccggccgaaccaagcacctccaacttgtaaaccgcttcaatcggcgtaccgtcagcattgacaatctgattgttcaaaaaaggcacaccgggggaaaaagtcagtttttctccaacagcattcagccacttcaagaacaccgcagagccttcataatgcccggtcagcgcggatttgacagatggaatgccccatacggaaatcatcgccgtcagcagcagaaatggcgaccaagccttaaaaatctgtccgcctctgtatgcaggcgccgccggatttgtgcgcgccgtttcaattgaggcggccgactcttgttcaccggcaaaccggaatgttgttttcggcttccaccatttcaaaaacacagcaagcgcagccattgaaacaagagctgacaaaacatcgggcagctcaggccctaaaaaattggaactgagatattgaacaacagcaaaggaaacaccggatacgagaatcgccggccagatctccaaggctttcctgaacccgctcatgatgatgattaaataaagaggaataaatacggataaaaacggcagctgccgcccaaccatttgcgaaatctccatcgccggaatccctgtcggcccttctacggctgtaattggaatcccaattgccccaaaggcaaccggcgccgtattggcgatcaaacagatccccgcagcataaagaggattaaagccgagaccgaccagcagcgcggcagaaatggcgaccggcgctccgaagcctgctgccccttctaaaaaagccccgaatgaaaaagcgatcaagagagcttgaagccgtcggtcatcagtaatcgagagaacagagctgcgaatgatatcaaactgtcccgttttcacagtgattttatacaaaaaaacagacgtcacaatgatccagccgatcggcaacaatccgtatacggctccttgtgtcgcggacatcagcgctttttccgccggcatacgataaaccaatacagcaatgataagggcgatccccaatgtggccaagcctgctgtataccccttcatccgtttaatcgcgagtgcccaaaaaaagaaaataatcggtacaagtgcggcaagcgctgataatagcaaatttccccctataggcgtatatgcctgtgtccattgcatcccaaacccctccttgaaacataaactggcgccatatgtaagcggtttctatagatgatatgatcatctgatgactgggtaataagaccagttacctagcattatattttgaaaaaaatcaaagtacaagactttttgacaaaatagtcaaaatcttttggcggcccacaaaacagagtataatagatcgtaaacagccagacctacaagttacggggtgaattgcattgaaatataaacagattaaaacaaaaaaatatatgaagaagtagcggatgccctattagatatgatcaaaaatggcgaattgaagccgggggataaactggactctgttcaggcgcttgctgagagctttcaagtcagccgttcagcggttcgcgaagcactttctgcgctaaaagcgatggggcttgtcgaaatgaaacagggagaaggcacgtatctgaaggaatttgagctcaatcaaatttctcagccgctctcagccgcccttctgatgaaaaaagaggacgtcaagcagctgctcgaggtcagaaaactgcttgaaatcggcgtggcttcactagcggctgaaaaaaggacagaagcagatctcgaaagaattcaggatgcactaaaggaaatgggcagcattgaagcggacggggagctgggagagaaagcagactttgcatttcatcttgcgcttgcggacgcttctcaaaatgaacttcttaaacacttgatgaatcacgtgtcatcattgctgctggaaacaatgagggaaacgaggaaaatctggctgttttccaagaagacctccgttcagcggctgtatgaggagcacgaacggatttacaatgctgtggctgccgggaacggtgcacaggcggaagccgccatgctggcgcatttgacgaatgtggaagatgtgctttcgggatatttcgaggaaaatgtgcaataaccaactcatttcccgggcaattccgccggttccgaatgatacgaacaactgagactgagccgcaaatggttcagtctttttacatggcagccagagggctttgtgcacttgacatttgtgaaaaagaaagtaaaatattttactaaaacaatgcgagctgaataatggaggcagatacaatggcgacaattaaagatatcgcgcaggaagcgggattttcaatctcaaccgtttcccgcgttttaaataacgatgaaagcctttctgttcctgatgagacacgggagaaaatctatgaagcggcggaaaagctcaattaccgcaaaaaaacagtaaggccgctggtgaaacatattgcgtttttatattggctgacagataaagaagaattagaagatgtctattttaaaacgatgagattagaagtagagaaactggcgaaagcattcaatgtcgatatgaccacttataaaatagcggatggaatcgagagcattcctgaacatacggaagggtttattgccgtcggcacattttcagatgaagagctggctttcctcagaaatctcactgaaaacggcgtgttcatcgattcaactcctgatcccgatcattttgactcggtaaggcccgatttggcacaaatgacaaggaagacggtaaacatcctgactgagaaggggcataagagcatcggttttatcggcggcacatacaaaaatccgaataccaatcaggatgaaatggacatccgtgaacaaaccttcagatcctatatgagggaaaaagccatgctggacgagcgctatattttctgtcatcgcggattctctgtagaaaacggctaccgcctgatgtcagcagcgatcgacacattaggcgatcagcttccgactgcttttatgattgcagcggacccgattgcagtgggctgtctgcaagccctgaacgaaaaaggaattgccataccaaacagggtaagcattgtgagtatcaacaacatcagcttcgcgaagtatgtctcgcctcctctgacgacgtttcatattgatatacatgaattatgtaaaaacgctgttcaattactgcttgaacaagtgcaggacaagagaagaacggtaaaaacattatatgtgggcgcagaattaatcgtcaggaagagtatgaattaaggatgacttaggacactaagtcattttttatttaggtaaaaaaatttactctatgaagtaaatagtttgtttacacattttctcaggcatgctatattatctttaaagcgctttcattcctaccgaaagggtgacaatcaatgaaaatggcaaaaaagtgttccgtattcatgctctgcgcagctgtcagtttatccttggcggcttgcggcccaaaggaaagcagcagcgccaaatcgagttcaaaagggtcagagcttgttgtatgggaggataaagaaaagagcaacggcattaaagacgctgtggctgcatttgaaaaagagcatgatgtgaaggtcaaagtcgttgaaaaaccgtatgccaagcagattgaagatttgcgaatggatggaccggccggcacaggccctgacgtgttaacaatgccaggggaccaaatcggaaccgctgtcacggaaggattactcaaggaattacatgtcaaaaaagacgttcaatcactttatactgacgcttccattcagtctcaaatggtagatcaaaagctttatggactgccaaaagcggtcgaaacgactgtgcttttttacaacaaagatctcatcacagaaaaggaattgcccaaaacgctggaagagtggtacgactattccaaaaagactgctgacggcagcaaatttggctttttagccctattcgatcaaatttattatgcagaaagtgtgatgagcggatatggcggatacatttttggaaaggccaaagatgggagctataacccgtcagacattggaatcaataatgaaggagctgtcaaaggtgcggcgctgattcagaagttttacaaagatggcctgttcccggctggcattattggagaacaagggattaacgtgttggaatcgctgttcacagaaggaaaagccgccgcaattatttctggtccatggaatgtagaagccttttcgaatgcaggaatcaattatggcattacgaaactgccgaagctggaaaatgggaaaaacatgagctcctttatcggcgtcaaaagctacaacgtcagtgcattttcaaagaatgaagagctggcgcaagaattagccgttttcctggcaaatgaaaaaaattctaaaacacgatatgaagaaacgaaagaagttcctgctgtgaaatccctagccaatgacccggctattatgaaaagcgaggcggcacgggctgttactgaacaatcccgtttctcagagccaacaccaaatattccggaaatgaatgaaatatggacgccggctgattcagcattacagacggttgcaacagggaaggcagatccgaaacaagcattggatcaagcagctgaaacggccaaaggacaaattaaggcaaagcacagcggaaaataaagagaaagctagatttgtattgtaagagaggtgaaaacggtgcagcatcgtcaagtcgctttgttgctttctatcattccgggactcgggcaattttataacaagcaatggataaaaggtattgtctttcttttcttaggcgcatcgttttttgcggtctttggagatctgctcaatatggggttttggggaatctttacactgggaacagaagtgccgcgggataattccgtttttctgctggcggaagggattattgctgtcatcgtgacctgctttggccttgcggtgtattatgtaaatcttcgcgatgcgttccaaagcggaaaacagcgtgatgaaaataagccattaagttccttaaaggaacaataccagcatatcatttctgagggctatccttatgtcgtcagcggcccatctttgtttattttaattttcgccgtgatctttcctatcttattcagctttgcattagcgtttacaaactatgatttgtatcattctcctcctgcaaaattaattgattgggtcggttttcaaacgttcgcaaatattttcacagttgatatttggaggtcgactttttttgatgtactggcttggacggtggtttggacacttgctgcatccacactgcaagtcaccttggggatttttctcgcgatcattgttaaccagaaagaccttcggtttaaacgtttttttcggacgattctgattttgccatgggccgttcccggttttgtgacgattttaatttttgcgggactgtttaatgatagcttcggtgcgatgaatcacgacatcttggctttcttcgggatagatccgcttccgtggatgacagatgccaattggtcgaggcttgcattgattctcatgcagggctggctcggatttccgtacatctttctcgtctcaacaggcgtattgcaatccatcccggacgatctgtatgaagcagctacgattgatggcgcttctgtcttttcaaagctgagatacatcacgcttccgatggtgttcattgcaatggctccgattatcattactcagtttacgtttaactttaataactttaatattatctatctattcaatggcggaggtccggctgtaaccggatcaacagccggcgggacagatatcctcgtttcatggatttataaattgacaatgcagtccagccaatattcacttgctgcggctttaaccattttattatctgtatttgttatctccatcgcattgtggcagttcagacagacaaagtcttttaaagaggaggcataaggtatgctggcagatatgaaagtcagaagatatatccgtctccttttctcttacttgttgctagcctttatggcggtcatcattgtttatcctctcctttggacggcaggcgcaagctttaatcccggcaacagcttaatcagtacatccatcattccgaagcatccgacattcgatcattacaaggaattatttgcgggcaaggaaagccttcaatatgtgcagtggtatgtcaactctatgaagatcagcctgtttacaatggcagggtctttgctctgtgtgacgtttacggcctatgcgttttcgcgctttcggtttaaagggaggaaatacgctttaacgctctttttattgctgcagatgattcctcagttttcagctttaattgccttgtttgtgctggcgcaaatcttgggaatgatcaatagccactggctgctaatcttgctttatatcggcggcctgatcccgatgaatacgtatttgatgaaagggtacatggattccattccgatggatttagacgaaagcgccaagattgacggagccagcagcaccagaatcttcttccagatcattctgccattatcaaaaccgatggcggcagtcgtggccatgaacggctttaccggtccgctcggagattttgtgctgtcctcaaccatattgagaacgcctgaatcatatacattgcccgtcggtctattcaatttagtgaatgatgtcatgggggccagctatacgacatttgcggccggagccctgcttatcagcataccggttgccgtcatctttattatgctgcaaaagaattttgtgtccggattaaccgcaggcggaacgaagggctaagagaacaaggaggagaatgtgatgtcaaagcttgaaaaaacgcacgtaacaaaagcaaaatttatgctccatgggggagactacaaccccgatcagtggctggatcggcccgatattttagctgacgatatcaaactgatgaagctttctcatacgaatacgttttctgtcggcatttttgcatggagcgcacttgagccggaggagggcgtatatcaatttgaatggctggatgatatttttgagcggattcacagtataggcggccgggtcatattagcaacgccgagcggagcccgtccggcctggctgtcgcaaacctatccggaagttttgcgcgtcaatgcctcccgcgtcaaacagctgcacggcggaaggcacaaccactgcctcacatctaaagtctaccgagaaaaaacacggcacatcaaccgcttattagcagaacgatacggacatcacccggcgctgttaatgtggcacatttcaaacgaatacgggggagattgccactgtgatttatgccagcatgctttccgggagtggctgaaatcgaaatatgacaacagcctcaagacattgaaccatgcgtggtggacccctttttggagccatacgttcaatgactggtcacaaattgaaagcccttcgccgatcggtgaaaatggcttgcatggcctgaatttagattggcgccggttcgtcaccgatcaaacgatttcgttttatgaaaatgaaatcattccgctgaaagaattgacgcctgatatccctatcacaacgaattttatggctgacacaccggatttgatcccgtatcagggcctcgactacagcaaatttgcaaagcatgtcgatgccatcagctgggacgcttatcctgtctggcacaatgactgggaaagcacagctgatttggcgatgaaggtcggctttatcaatgatctgtaccgaagcttgaagcagcagcccttcttattaatggagtgtacgccaagcgcggtcaattggcataacgtcaacaaggcaaagcgcccgggcatgaatctgctgtcatccatgcaaatgattgcccacggctcggacagcgttctctatttccaataccgcaaatcacgggggtcatcagaaaaattacacggagcggttgtggatcatgacaatagcccgaagaaccgcgtctttcaagaagtggccaaggtaggcgagacattggaacggctgtccgaagttgtcggaacgaagaggccggctcaaaccgcgattttatatgactgggaaaatcattgggcgctcgaggatgctcaggggtttgcgaaggcgacaaaacgttatccgcaaacgcttcagcagcattaccgcacattctgggaacacgatatccctgtcgacgtcatcacgaaagaacaagacttttcaccatataaactgctgatcgtcccgatgctgtatttaatcagcgaggacaccgtttcccgtttaaaagcgtttacggctgacggcggcaccttagtcatgacgtatatcagcggggttgtgaatgagcatgacttaacatacacaggcggatggcatccggatcttcaagctatatttggagttgagcctcttgaaacggacaccctgtatccgaaggatcgaaacgctgtcagctaccgcagccaaatatatgaaatgaaggattatgcaaccgtgattgatgtaaagacagcttcagtggaagcggtgtatcaagaagatttttatgcgcgcacgccagcggtcacaagccatgagtatcagcagggcaaggcgtattttatcggcgcgcgtttggaggatcaatttcagcgtgatttctatgagggtctgatcacagacctgtctctctctccagtttttccggttcggcacggaaaaggcgtctccgtacaagcgaggcaggatcaggacaatgattatatttttgtcatgaatttcacggaagaaaaacagctggtcacgtttgatcagagtgtgaaggacataatgacaggagacatattgtcaggcgacctgacgatggaaaagtatgaagtgagaattgtcgtaaacacacattaggctgatgctccgctcgatatgggcggattcttttttctatagaatgaaaacgcttgctaagtcttggggggatgaaatcatgaaaagcaaagtgaaaatgttctttgcggctgccatcgtgtggagtgcatgtagttcaacaggatatgccgctgccattgagaaggagaagcacgtgtcagagcttcgggcagaggatctttttgttaaaaaagtagaggggatgaacaaggattttatcaaaggggcagatgtatccagcgttattgctttggaaaacagcggtgtcaccttttacaatacaaacggaaaacgccaggatatctttacaactttaaaacaggctggggtcaactatgttcgcgtccgcatctggaatcacccgtatgattcaaatggcaacgggtatggcgggggaaacaatgatgttcaaaaagccatcgaaatcggaaaaagagcgacagcgaacggaatgaaggtgctggccgactttcactactctgatttctgggccgatccagcgaaacaaaaggtgcccaaagcctgggcgaatctcagctttgaagcaaaaaaagcaaagctctatgagtatacgaaacaaagcctgcaaaagatgatcaaggaaggcgttgacatcggcatggttcaggtcggaaatgaaacaacaggaggatttgccggtgagactgattggacgaagatgtgccaattatttaatgaaggaagccgagcggtcagggagacaaattcaaatattttggtcgccctgcattttaccaatcctgaaacggctggaaggtattcatttattgcagaaacactcagcaaaaacaaagtggattatgatgtgtttgctagctcctattatcctttctggcatggcacattacaaaatttgacctccgtgctgaaggctgttgccaatacgtacggcaaaaaagtcatggtggcggagacatcgtacacctataccgctgaggatggcgatgggcatggaaatacagcaccaaaaagcgggcagacgttgccatatccaatttctgttcaaggccaggcaactgcagtaagagatgtaatggaggcagtggcgaatacgggcaaagcaggacttggtgttttctactgggagccggcgtggattccagtcgggccgaagacacagatagagaaaaacaaagtgttatgggaaacatacgggtcagggtgggcgtccagctatgctgctgaatacgaccctgaagacgccgggaagtggtatgggggaagtgctgtagataatcaagctttatttgattttaatggacacccgctgccttccttgcaggtgtttcaatatgcggagtcaggacatattccaaagaaacgctgaaacaaaaaaatccatgagatgtaacaaatcattgttatgtctcatggatcattttattttacatcaactaatataaaacattcgtcatcactcttatgatgagcttccttttgatgctgcagtgatgtaaggattttctccttcaggtcagcgattggcgaatcaggatgatcctttagtaaatcaaataaataacatgaagccgtaggatccatcacgccatccgtatacagaagcaatcttccgtcctccgtgtatgaaaggctgcttgactgaaactctaagtcttcaaacatcccgatcggaggcgaggtcgcgtgaagcagatgttgagttccgctatcgtcctgccaaagtgccggcggatgccctgcgttgacataatcaattctttgccgtgctatatcaatctcgagataaatagcagtgcaataatgtcttgcttcctcatcattttgaaacaagctgtgaaggtgccggtccaattccttcataactttaacggggctgagaccttgcgtgatctggcgctggaacaaaggatgaagagacatcgtaatcaatgcagatgaaattccgtgccccatcacatcaaggataataatgccgtaacggtgttcatcgatttgataatatccgtaaagatcacctgacaattcactcgatgcgttgtaataagagtcaatctgaacctgatcgtttacaatcggttcagtcaacgagtttttctggatctttctggcgagttcaagctctcttttggtgtttaatttaaattgttgattttgtttattgatctcaagaagttcttcttgttttgctttcagcgtttccaaggcaatttctaactccgcattggctttctgtttggcaagcaaagcttcctgagcctcatttctggctatcagcagctcattttcatattcatttcgctttcgcattggaatcagaacacaatcaaagacagaagccccgctatcgtgtctcgcaatagcattgataaggacgggaatttcttctccatctcttgctttcagggaaatgtatatttcttcgatgtgatgctccaatttcaaaagcggaaaaaaataaagctggcagaaaagctgcgcgggaatggtcaacatcatattcatgtgctggccgataacctgctccggttcataatccagaatcttgataagggtgcggttggcagctatgatcgacccctcttctgacaaagcgaggaaaccgcatggtgcatcattcaattgtttgtccatctaagagggtcacctctatccctttcgttcctatatcacacgtgtgcttttaaataatcgccgatcagctgtatcgtctcatctggatggctcatatgagggcaatgtccgcgagcctccatttgtttcagactgctataaggcagatgctgatgcatatacttacctactgttgcaggtgcgatgatatcatctgcacattggagaataagagagggaaccgttaccttcgaaagatcctctcggtgatcagaaaaaaacgccgctttcgcgaattggcgggcaatgacaggatcagtagaacaaaaacggctttcaagctcttccttaatttcaggccgatctggctgattcagaacggttgccgcaaatacagtcgcccagccgatataatttttctccatcatctccagcaagccaaggagctgctcctcttcaaatcctccgtaatactcaggcggatcattcaaatagcaaggagaaggccccaccatcaccagatgggaaaaaagctccgggcggcggatggatgcaagcatcccaatcaaggccccgacggagtgacccacaaacacggtttccttcagatctaaagcttcacaaacatcaagaacatcctgggcatagccgtcaagtgtctggtaacgattcaggtcatatgcgcgcaaatctgaatgtcccgaaccgacgtaatcaaataaaatcacccgatgatcttcttcaaaggcaggtgccacggcattccacacgctttgatcgcatccaaaaccaggtgcgaacatgatagatgctttgccgctgcctttcaccttcacatgatttctagacaaaatcgcttcgttcatgattggctcctttcagccggaaagtaatataaagttcaatatttctatcataacactcggatggtttgaagagtgtatctttctatgaatgtcacagcagtttaaaagaaagaggacatgggagatagaaaagatggatgaattggaagatgcaggaggaggattgcctagacaccggggtgagaaaaaaatgacatttgtcactccatcatcatgacaccccatactaacatcgtcttctccgtcattttacaatcaatgtaaacgatcaggaggtgctcatgtgatgaaagaagcagtaacagtaagcaacgtgacaaaacatttccagcgaaaaaccgctgtaaacaacatcagcttcagtattgaaaaaggagaaattgcagccattctcgggccaaatggggcagggaagacgaccgtcgtctcgatgatattaggattgctgaaaccgagtgagggagaaatcaaactatttaaccgggttcccgatgatcaacaggttcgtgaaaaaataggtgtaatgcttcaggaagtaagtgtcatgccgggccttaaggtggatgaaatccttgaactcttccggagctattatccgaatccattgtccatgaaagaactcgtttcgttaacagcactcaccaaagaagatttgaaaacaagagcagaaaaattatccggcggacaaaaacgccgtttgagctttgctttggctcttgccgggaacccggagctgcttatacttgatgaaccgacagtcggcatggacacttcatcaagacaccgattctggcagaccattcacggactgtcggaccaaggaaaaacgattattttttcaactcattatttacaggaagcagatgatgccgcacagcgaatcctattttttactgaaggacagcttgttgcagacggctcaccaatgcaaatccgctcaagaattcaaaaacagtctgtttcctttacgcttcattcaagtgaatcattggaaaggctgtcttgtcacccggaagtcgagagagtgatccacgagcatgagagaaccatcatccagacatcaaatacagacaaagtgttggcgctgatctttcaagaaaacatacatgcacgggatattcgaattgagcaagcaacgctcgatgaggcatttcgccagctggctgacggcaacagggaggcgatgtgagtgaacgtgctgcaaaagcaaagcatcgctgaaatgaaaagggtgcttaggaacaagtactttgtgctttggtctctgatcatgccgattgccttttattatttctttacaaatgtagtgaataccaacgtccctgatcaacgtgcatgggaagcccattacctgatgtcgatgacagtcttcagcgtgatgggttcctctatcatgacgcttggcatccgaatggtacaagaacggtcacaaggctgggccgcctttatccgccttacgcctcttccggatcatatctatttatcagctcagatgatcggccaaagtgtcattcacgttttatcaattaccgtcatatttctgttcggcgcaatcatcaatgatattgccttgtcaccgtttgaatggatgatgagcggactgtggattttgtttggcgcattgccttttttagcattaggcacactaatcggcctcatgagaaaagtagaaacagcggccggaatcagtaatgtgctttatatgctgctggctttaggcggagggatgtggatgccgtttgaggtcatgcctgacatgatgcagagcattggccagtggcttccgtcttatcatttcgggagcggagcgtgggaacttgtccggggtgggagtccgacttggaaaaatattctgatattaatcgcttatatgatgctcttcatgctactatctaaatatataagaagaaaacaagaagcggtgtaatacatgaaaaaggcaatatctattttcccgaaggaattcgggtttttcccttatatctttctggtgtatacgattatgccgttcctctctttattaaaagaatcaggggtcaaacaggggatcggatatggtatgctgctcctttttgtagcggcatatcgccagttattctgcagcgtgggcaaagcttcgtttacatattggcttatcgtgcaaatggcggttattttgatgtatagtgtgttttacaatatcacctatatatacttaggtttttttccggcaaactttgttggttattacaaagagaaaacgaattttaaccgtgcgttctgcgctttaatctttatactgctttttccatgcctataccaatttatcgcgaattcggtctcgcttcgggagcttttttctgttctcccgtttctcgtcattatgctcatttctccattcggaattcgttctatgtttcggaggattgagcttgaagctaagcttgcacaagccaacgaacagataaaagaactctctaaaagggaggaacgtgttcgaatcgcccgtgatcttcacgatactcttggccacaccctgtcgctgcttacattaaaaagccagctcattcagcggctggctgcatctgatccagaacggaccaagcttgaggcaaaagaaatggaaaccagttcacgctccgcactcaagcaagttcgagagctggtttctgatatgagaacggtcacgataacagaggagctcgtaaacattcagcacatattaagagcggggaacattacctttcaatacgaaggagccgacgacttttcagtgatatctcccgtcactcaaaatattatcagtatgtgtatgcgggaagccgtgactaacattatcaagcacagcaaagcaacccactgtgccatcaccatttctcaatttgctgacaaaatgaggatcgtaatacgggatgacggaaagggagcgccgaaggagaaaatgtttgggaatggcctgtggggaatggaagaacggctcatgctcattgaagggggattaacggtttcagaccataacggaacggttgtggcactgacgattccgcttattaaaaaagcagaatgattggaggacgaaaagaatgattcgtctgtttattgctgaggaccagcgaatgcttttaggcgctttgggatctttgcttgatttagaagaggatatgacagtcatcggacaagcattaaacggggaagaggcgctacatgctattttgaagctggagccggatgtatgcattatggacattgaaatgccggttcgaagcgggctgaatgtggcagaggaattaatgaaaaaaggctgcgtcagcaaggtcattattttaaccacctttgcccgccccggatattttgaacgcgccgtaaaggccggtgcacatggctatctgctgaaagacggtgaaattgacgatctggccgatgccattcgaaaatgtgtaaagggaaaacgtgtcttcagccctgagctgacgtttaatatgatgcgagacgaaaatccgctaaccgttagagagcaagaaattctgaggcttgcggctttaggcaagacaacaaaagacattacgctggagctctatttatctcaaggcacagttcgaaactatatctcagaaatcatccaaaagcttaatgcgaaaaatcggacagaagccgccagcatcgctgaggaaaagggctggatctaaccatatactgcactcctgggagatcgggagtgtttttgatatgccacaaatgaaaatatccctagaaaactctttccttccattgtcagaatagtgtacgatattcatatagttattttaactcaggtcatcagatgacctgatcatatattggggatgagagaggggttcatcatgaaagtctcactttttgtcacttgtcttgttgatatgtttcaaacaaatgtcggaaaagcaacggttgagctgctggagcggcttgggtgcgaggttgattttccagaagggcagatttgctgcggacagccggcttacaacagcggctatgtacatgacgccaaaaaagcaatgaaacggatgatcgaaacgtttcaggattccgaatatgttgtcagtccttcgggttcctgcacaacgatgttccgggagtatccgcacctgtttcaggatgatccgaaatgggccgataaagcgaaaaagctggcggataaaacgtatgaactgacagattttattgtgaacgtccttggggtagaggatgtcggcgcgacccttcatacaaaagcgaccttacatacgtcgtgccatatgactaggctgctgggtgttcggaaggagccgatgaagctgttgagccatgtgaagggcctgcagtttacagagcttccgggcaaacataactgctgcggattcggaggaacgttctcagtcaagatggcgcagatttctgagcagatggtcgatgaaaaagtcgaatgtgtggaggaaacgggagcagaggtgctgatcggtgctgactgcggctgtttgatgaatatcgggggacggcttggccgaaaagataagaatgtcaaagtgatgcacatcgccgaagtgctcaacagcagataaaactggattcagagggggaaaggatcatggcgatgaaaatcggtactgacgcttttaaagagcgggtatcacaggggattgataatgaatttatgagaggcgctgtttcaggtgcacaggagcgtctgcggacgcggcgcctagaggcagcagaagaactgggaaactgggaggagtggcgctcattatcagaggaaatcaggcagcatgtccttgaaaaccttgatttctatctcggacagcttgccgaaaatgtggcgaaaagaggcggacatgtctatttcgcgaaaacagcggaagaggcgtcttcctatattcgggatgtcattcaaaagaagaacgggaagaaaattgtgaaatctaaatcaatggtcacagaggaaatcaatctgaatgaggtgctggagaaggaaggctgtgaagtcgtagaaaccgatctcggcgagtatattttgcagattgatgatcacgatccgccgtcacatatcgtagcgcccgctcttcataaaaataaagagcagatacgcgatgtgtttaaagaaagactggactatcaacatacagaaaaaccggaagagctggtgatgcatgcgcgcgccattctccggaaaaagtttctggaagcggatatcggcattaccggctgtaacttcgccatcgctgacacgggttccgtcagccttgtgaccaatgaaggaaatggacggcttgtgagcaccttgccgaaaacacaaattaccgtcatgggaatggagcggattgtcccgtcattttctgaatttgaagtgctagtcagcatgctgactagaagtgctgtcggacagcggctgacaagctatattacagctttgacgggtccgaagctggaaggtgaagtggacggtccggaagaattccatcttgtcatcgttgataatggacgatccaatatccttggaacggaattccagtctgtgctgcaatgtatccgctgtgccgcctgtatcaatgtctgtcctgtgtaccgccatgtcggcggacattcatacggctcaatctactcggggccgatcggagctgttttatcaccgttgctcggcggttatgacgattataaggagctgccgtacgcatcttcactgtgcgctgcttgttcagaagcctgcccggtcaaaatcccgcttcatgagctgctactcaagcatcgtcagaatatcgtcgaaaaagaaggcagggcgccgatcagtgaaaagcttgcaatgaaagcattcggacttggcgcatcctccttatcgctttacaaaatgggctcaaaatgggcgccggccgccatgacgccttttacagaggacgaaaaaatttcgaaagggcccggcccgcttaaaaattggacccagattcgcgacttcccggcaccgcataaatcgagattcagagactggtttgcggacagagaaacaagtgaacgcacgaaggaggagcagtgatgacgaagggaaccattcagaatcaagagagctttttaaaccgaatcgcatccagcctgggccgtgaacgaagaacaggaggcgtggcagtccctgaatgggcgcatcagccgcaatataaaacacttgaaggttattcagcggatgacttagtcacagtgctcaaaaaccattgtgtcaaaatccatacagagctgattgaaacggattcaaccggcctttacgatgccctgcgcgagcaagtcagccgcttttctggaggccctgtcatcattccgaaggacccccgctttgaagaatacggactgaaaagcctgctcaccaaggactggccgagtgaaggaacgccggtctgggagtgggatgctgacaaaggcgaggaaaatattaaaaaagcggagcaagccaatgtagggattacattcagcgaaattacattggctgagtcggggacggttgtcctcttctcctcaaaagacatcggccgctctgtcagccttttgccaacgacttatattgcgatcgtgccgaaatcaagcattgtaccgagaatgacacaagccagtgatatcatccgccaaaacattgcgaacggtgtcactgttccttcatgtatcaactacattaccggaccgagtaactcagccgacattgaaatggatttagttgtgggggtgcatggaccagtaaaggcagcatatattctcgtctctgaccgctgaactcaggaagcccggcaggcatatgccgggctttttgcttgaaaaaacttcaacttccaattttttggccgatgagaagagtatgacttgatacaggaggaaatgcgatgaaaaaatggctgatcatagcggtttcactggcgattgcgattgttctgtttatgtatacaaaaggagaagcgaaggcagccggtatgacagtaggctacacgactggggatacggcttcatacaattctcttacgaaatatcatacatacatgaatgccatcgcaaccgatacatttgcgtttgaaaaaaacggacaaatcattggcgatgccccaactaagcagctgacatatgcgaaaaagaaaaaaatcaagacatgggctgtcatttcaaactataatgatgccatttatgattttgacggagatttagcgagtcgggtcatgagcaataaaacagcgaaaaaacgattcacagatcagttaattacactggccaaaaagcactcatattacggaatcaatatcgattttgaagcagtaaatccagaagaccgcgctgcatactcgaacttcattcaatatgtctcacaggctttgaataagaaacatattaaaacaatggtatccgttccggccaaaagcgccgatgataaaaatgatgactggagctggccgtatgattatgcgaaaatcggcaaatatgccgacttcgtacaagtcatgacctacgatgaacacggcatttggggtgagccggggtcagtggcaagcacaaactggatcaaaagctctctgcagttttcagtcaaaaagatcaaagccaataaagtcatcatgggaatccctgcgtacggctatgactgggatgtaaaagacggaagtaccagcacaataagggaatggaatgagctcaaatccctcatcaaaaaacaaaaagcaaagccggcattcaacaaaaaatcaggctcgatgacgttttcttatgttgacaaaaagaagcataaacatgtcgtgtggtatgaaaacgaaaaaaccgttcaaacgaaaagccatctggcaaagcaatataaaatagcaggtgtttcagtttacgcattaggaaacgagtcagaatccttttggaaagccattcgaaaagggacaaaataacagtttcttttttctctgaagttattgacagttaaaagagaagcacgtatattatgttaatatattcagatcataaaatttgagtttttcagaaaactaaaacacatagattgggagcagtaaaagaaagtgatcagaacagagagctgcggggtggtgcgacgcagcctgattcttctttgaactcgcccgggagtggtaagacggaacggaatagattgaatattccctatgttttaacggctaaccttcgttacaggtcaaaagcaggattcttcatgaagaatcaacaagagtggtaccgcggtcagccgaaggctcgtcgtctctttatctattagattaggtaggagacggcgggcttttttgtttttgaaaacgagaaggagaggtagaagaggatgaaaaacgacaatcaaacgttaaaacgcacgatgacgtcccgccatattatgatgatggcgctgggcggagcaatcggcgcaggtttatttaaggggagcagctcagcgatcgatgtggcagggccatctgtcattatcgcatacctgctcggcgggattattttgctgtttattatgcaggggctggcggaaatggctgttcgaaaccgtaacgccagaaccttccgtgatcttgtccagcaggtattgggaaattacgctgcttactttttggactggatctactggaaaatgtgggtgcttaacattgcggctgaagctgttgtagctgcgattttcattcaatattggctgccgggctgcccgatctgggtgttggcattaggaatttctcttatcgtcacgattgtaaacttgctttctgttaaaatcttcgccgaaactgaatattggctggcaatgatcaagattaccgttattattatctttattattctgggattgctgctcttatttgtatcattcggtgatcatacagcatccggattttccaacctgacagaccacggcggatttttcccgcacggcggcacagggctgatcacggcgatgcttgtcgtcatctactcttacggcggtacagaaattatcggtgtaacgcttgcagagacaaaaaatccggaaaaggttgtcccgaaagctgtccgcagcacactgacacggattgtcgcgttttacctgctgccgtttttcatcatcgtcagcctgattccatggaaccaagtcaattccgttccggaaagtcctttcgtgatggtctttaaaatggtaggcattccgggcgcggatcatatcatgaatgcagtcatcctgctggcgatcatttcttctatgaattcaggtttatacggatcatcacgcattttgtatacacaggcaagtgacggaaggcttccaaaggtcttctcgaagctttcatcgaaaaacgtaccgatgtttgcgattctgatgtgcacttcttctctctatattggcgtattgatttctctgttcgcaggaagccaaacatttaattatttaatgggatcattgggatataccgttttattcatttggctgatcatcggattcgctcatttaaaatcgagaaaacagcaaacggaaacaccggcctattatgtaaaatggttcccgtacacgacatggtttgcgattgtggcattactcgccattctgatcggggtcatcatgacaacatcaattgtcattaccggcattactgcggcgatctaccttttgattacagttgcatatttggtcaaaggacgcaagcatcagtaaataagaaaccctcttgccgcatccggcaagagggtttttattattgtgcagctttctcgtttataccaatcgccgcagctttctgcgcttttgattttgtattcacgagacagatgctcgtgacaatcagcagcagccctgccaagaggctaagggtgagcggttcatgcaggaaaatggagctggccacgattgatatgagcggaatcaaaaaagtataagatgcgaccttgcttgcttctcctgaaccgacaagcgtaaaaaagacaagccagccgagtgcgataacgaatacggagatgaacagcaggctcgtaataaacggagctgtccattggatcgccgaaaagctttctgtccaaaagccggagataagcagaaacacgcttccgatcgtcagctgcagagcgaccatccagatggaatcgacgcggctgcctgtttttttcatatatactgtcccgagcgcccagctgactgcggagccgagagccagcagaaccccaatgacagaaatatgcccgccaaagcccgcagcactaatgacggctactcccgcaaaaccgaggatgaggccaatcactttcattacaaacatggattcgccgagccacagccaagaaaatacacccatcagaacaggctggaagaagacgattgcagaaaacaggccggccggaagataattcagcccgatcgtttgcaggccgtagaataatgtaatatttaaaagagcagaaacaagataaatcggccacgtttcttttaagcgtaatttatgaatacgcggcagtgcgactatgactaataaaagcccgccgatcagcgttcggatgcccgcgaacaataatggcggagaataggcgagcgcggctttggacagcggccaattgacgccccacatgatgacgagaaatgcgagcaggagagctgtccgcgtttttgggagctgcttcattgttcattcactccttgtagaacttttccatcatatgatacggtagaacataagataaataaaatgaatcttttttataaggagcataagtaaattgttatgaccattactcaattaaaggtttttgtgaaaatagctgaaacgggaagctttacaaaagcgggtcaggcgctgaacatgacacagccggctgtcagccatgcgatttctgcgatcgaagctgagcttgatgtaaagctgatcattcgtgaccgccgcaatggcctgatgctgacggatacgggaaaacagatcttagtacacatcagagaagtcttaaaaggcattgaaaaagttgagcaggtagcagcagcggaaaaagggcttgaactgggaacgatccatatcggcacattctcaactgcctcggcttattttatgccgaagctgatcagtgaatttaaacaaaaatatccgaaacttgagctcgtgctgcacgagggaactgtaaatgaagtcaaggagtggcttcatacgcggatgatagatgttgggattcttctgtatccaacagaggagatggagtacattcatttgaaaaaagacaaaatggctgtcgtgctcagggacgatcacccgcttgccagtcattcagccattacgctgaaagatcttgaccatgaaccgatgatcgtctgtgacggcggctatgaatcaccatttatcgatatgttcaggcaggcgggtgctacgctgcacccagctttcacggtctataacatcaacacctcgatcagtatgatcagagaaggcctgggcctggccattttatcagaaatgtccatgtcggggatgccgctgccagagcatgtggtgaccagggaattggacccgcaggtataccgtgatgtgcagcttgctgttccgtcgctaaaggaggcttctctggcggctaagctctttattgagatggctaaggagttgtttggagcagaataatgttccaaaccgttcgttttatattgttcgaatttcatcgaatcaaattcttttattcctgaatgcagttgtgttatggtgtgatagaagttctttcaatcatgacctgacagctttgggctgtttactgataacacatttgcaaaggagaacaatatgtctaacaaccaacgcaaagataccttgctttctgtcttgaatttatctccggttgttcagggaggaacgattgcagaatcattccgaaacagcatggacttggcgcgccgggcagaggaatggggctatcaccgttactggcttgctgaacatcataatatagaaggtgttgcaagctctgccaccgcagttttgattggccatattgccggaggcacgaagaaaatccgcgtcggttccggcggcattatgctccccaaccactcttcattagtcattgctgaacaattcggcacactggaaacactgtatcccgggcggattgatctggggcttggacgtgcgccgggaacagaccaattgacagccagagcgctccgcagaaacatcaacagcggggaggattttccagaacaattagaggaactgcgcaattattttaaaccgtcaggaaatgtgcgcaatcaagttcgcgccattcccggagagggcatagatgtgccgatttggctgctgggctcaagcggcttcagcgcccgtctggctggcgaacttggtcttccgtttgcgttcgcggcccatttctcaccggcgaatacggttcccgctttggagctgtaccgcaattccttcacgccgtcagacgtgctcgacgaaccgtatgcgatggtcggtgtcaccattatcgcggcagatacaaacgagaaagcgcagcaccttgcgacttcccattatcaaaggtttcttgatcttgtccgcggtacgcctaaccagcttaaaccgcctgttgaggatatggaccaaatctggagcccgtatgaaaaagcgatggtcaatgagcagctgagctccacgattgtcggaggtccggaagaagtgaaggcgaagcttgaagatttcgtcaaaacgacacaggctgacgaaattatggttaactcagaaacctttgaacacgcagacagaatgcgttcgtttgaaatcatcgctgacgtttggaaaaacagataacagctataaaaaaagcaatgtagcggggagacccatacattgctttttttattcattcagttttcgtgcggactggcgaatgatcaactcaggctcaaatatgacatcctcttgcttcggctttttatgctctaagcagtcaatgacatatttggcggctgcttttccaagcactgatttcggatgtttgacagaggttagtttcacttctgagatttgggcgaaatgtgaatcatcgtacccgacaatagacatatcctccggcactttaagatccatctccctcagcatatcaatcaccttcagcgcaatttcatcgttataacaaagaatggctgtcggcatgtgcttgctgtttttctccagtgtggcttttactttctccagaagttttgattctttttcttccgttgtaaatgtcacgatcatatccggagaaggaaacaactcacgctcccggtgcgcctgtataaatccgttcatccgtttcacgccttgtgtgtcatcagctttaaaaatacccatcatatgcgtgtggccgagagaaagcaaatgctccgccgccatcatcccgcctttcacatcatccaaggtaaaacttggcgcggcaagctcggcatatgacgcgttaatcatcgcaaaaggaatgccgtttttctccaagttcagataatagccgatgtttggggtttgaagggcgctttttgtcggttctacgatgagtccgtcaatatgctgggacagcaggttttctaagcctcttctttcattgtccgggttgttgtttgtgcttgtcaaaagcatagaatacccctgctcgcttaaataggactcgattcctctgatgatgctcgggaaaatatagtctgatatgtaagttgtcaaaacaccgatcgttttattggaatgcagcgctgacttagcagagcgtgaagcgacaaaggtgcctccgccttgcacgctgtacagcagaccttgtgatacgaggtctccgatcgctttgcggatggtatgccggctgacgccgaattgctgcattaattcgttttcggtagggattttttgatcgggcagtattttgccttgattaatccaagaactgatttcttcttttacttgcgcgtattttggtaacatatccattcctccaaaatgtatacggacaaatttcagtatatcacagcgttctttgtaagaaaacattgacagaaaatgcaaacaagattattctatatttgtacgtactaattaaatgtaattttcgttaaattttaatataagtacgtacaattgaaggtttaaatgaaaacgctttactcaacattcgggagggcagggaaatgaagaatactccaactcaattagaaccaaatgttcctgtaacaagaagccattcaatgggatttgtcattttgatctcatgtgcggcggggcttggcggcttattgtatggctatgacacggcagtgatttctggcgccatcggttttctgaaagatttatacagcctgagtccgtttatggagggacttgtcatttcaagcattatgattggaggagttgtgggcgtcgggatatccggatttttaagtgacagattcggccggagaaaaattttaatgacagccgctttgttatttgcgatatcagcaatcgtttcagcgctttctcaagacgtgtccaccttaatcattgcaaggattatcggggggctgggaatcgggatgggctcatcgctctctgttacgtatattacagaagcggcaccgcccgctatacgcggaagtttatcttcgttatatcagctctttacgatactgggtatttccgcaacatactttattaatctagctgtgcagcggtccggaacatacgaatggggcgtgcacaccggctggagatggatgcttgcttatggaatggtgccatccgtcatttttttccttgtcctgctcgtcgtcccggaaagtccgagatggctggcgaaagcgggcaaaacaaatgaagctttaaagatcctgacacgtattaatggagaaactgttgcaaaagaagaattaaagaacattgagaactctttaaaaatagaacaaatggggtcgctctcccagctgtttaagccgggtctcagaaaggcgcttgtcattggaatcctgctggcgctgtttaaccaagtcatcggcatgaacgcgattacttactacgggccggaaatctttaaaatgatgggattcgggcaaaacgccggatttgtgacgacttgtatcgtcggggttgtagaagttatttttaccgttattgcggtgttgctgattgataaagtcggacgaaaaaaactgatgtccatcggttctgcttttatggctatttttatgattttaatcgggacgtcgttttattttgagttaacaagcgggatcatgatgatcgtccttatattaggttttgtcgctgctttctgtgtctcggtcggaccgatcacatggattatgatttctgaaatcttcccgaaccatctgcgtgcgcgggccgcgggcattgcgaccatctttttatggggagcaaactgggcgatcggacagtttgtgccaatgatgatcgattctttcgggctcgcctatacattttggatctttgcggtgattaacatcctttgtttcctgtttgtcgttacgatctgtccagaaacgaagaacaaatcgctcgaggaaattgaaaagctttggataaaatgaaaacgctttaatgaaacagccctttctacgggaagggctgtttatattgggatgcaccatttggcgctttctgtataagataaagatatataggataaaatattgctggataaaacgacgcggcatgaaaactctgcgaatattgtcgatgaattggctcttaacagttgaataaacaattccaccctgttaaaataattaaagaaagcagaaatgattttttttggctatgacgggacgttttttgtcatagcgggacatataatgtccagcaaaaaaggaaggaacgtttgagtcatgaaccagttaatacaagctcaaaaaaaattattgcctgatcttctgctcgttatgcaaaagaggtttgaaatcttgcagtatatcaggctgacagaacccatcgggcgaagaagcctgtctgccagtctcggaatcagcgagcgtgtgctgaggggcgaggttcagtttttaaaggaacagaacctggtcgatattaagacaaacggcatgacattgacagaagagggctatgaactgctttctgttttggaagatacgatgaaagatgttttaggtttgactcttttggaaaagacattaaaagaacgtttaaatctaaaggatgccattatcgtatccggagacagcgatcaatccccatgggtcaaaaaagaaatgggaagagcggctgtcgcatgtatgaaaaaaagattttcaggcaaaaatatcgtcgctgtaactggcggtacgacaattgaagctgtcgccgaaatgatgacgccggattctaaaaaccgcgagcttttgtttgtgcctgcaagaggcggtttaggcgaagacgtgaaaaaccaggcgaacaccatatgcgcgcatatggcggagaaggcttcaggcacttaccggcttttgtttgttccgggacagctgtcacaaggcgcctattcatctattattgaagagccttctgtcaaagaggtgctgaacaccattaaatcagcgagtatgctggttcacggaatcggcgaagctaaaactatggctcagcgcagaaacacgcctttagaagatttaaagaaaatagatgataacgacgcggtgacggaagcgttcggctactattttaacgcggacggcgaagtggttcacaaagtgcattctgtcggaatgcagctggatgacatagacgccatccccgatattattgcggtagcgggcggatcatcaaaagccgaagcgatcgaggcttactttaaaaagccacgcaacacggttctcgtcacagacgaaggagccgcaaagaagttattaagggatgaataatccctcaatataaatatctctcacttatttaaaggaggaaacaatcatggcagtaaaagtcggtattaacggttttggtcgtattggacgtaacgtattccgcgcagcattaaacaatcctgaagttgaggtagtagcggttaacgatttaacagatgctaacatgctggctcaccttttacaatatgattctgtacacggaaaattagacgctgaagtttcagttgacggtaacaaccttgttgttaacggcaaaacaattgaagtttctgcagaacgcgatcctgctaaacttagctggggcaaacaaggcgttgaaatcgtagttgaatctactggtttcttcacaaaacgcgcagacgctgcgaaacacttagaagctggcgcgaaaaaagtaatcatctctgctcctgctaacgaagaagatatcacaatcgttatgggtgttaacgaagataaatacgatgcggctaaccacgatgttatctctaacgcatcttgcacaacaaactgccttgcgccgtttgcaaaagtacttaacgataaattcggcatcaaacgcggtatgatgacaactgttcactcttacacaaacgatcagcaaatccttgatcttccgcacaaagactaccgtcgtgcgcgtgcagcagctgaaaacatcatcccaacatcaactggtgctgctaaagcagtttctctagttcttcctgaactaaaaggcaaactgaacggtggagcaatgcgtgttccaactccaaacgtttctctagttgacttggttgctgaactgaaccaagaagtaacagctgaagaagtaaacgcagctcttaaagaagcggctgaaggcgaccttaaaggaatccttggctacagcgaagagccattagtttctggcgactacaacggaaacaaaaactcttctacaatcgatgctctttctacaatggttatggaaggcagcatggtaaaagtaatctcttggtacgataacgaaagcggctactctaaccgcgttgttgaccttgcagcttacatcgcaaaaaaaggtctttaatttatagctgaaaaaggacctgacttggttctttcgaatagaagcgctataatgaaagcggacaagggaaggggacggactccctttccctttttccatgaagaccggctttcagaaaacgctctgtgatagagaaacgaccgcgttttaagcagctttgccggcgctttcgcctaaggccgctgccctggcttttagacgaactgccctgtgccgaaaaagactgcgatctgccctagcggagttatcgcttgaacagacggtttcacgtttttcgtgctgtatgcaaaccattttgaaggaggatctcctaggcatgaataaaaaaactctcaaagacatcgacgtaaaaggcaaagttgtattctgccgcgttgactttaacgttccaatgaaagacggggaagtaacagacgatacacgtatccgtgctgcgcttccaacaatcaaacaccttgcagaccaaggcgcaaaagtccttcttgcgagccacttaggccgcccgaaaggcgaagtggttgaggagcttcgtttaactcctgtcgctgcacgtctcggcgaactgcttggcaaagaagtgaaaaaagcggatgaagcatacggcgatgctgtaaaagcacaaatttctgagatgaaggacggagacgttcttgtattggaaaacgtacgtttctatcctggtgaagagaaaaatgatcctgagcttgcaaaagcatttgctgagcttgcagatgtatatgtaaatgacgcattcggtgctgcccaccgtgctcacgcatctacagctggaattgccgagcatctgccagcagttgcaggtttcttaatggaaaaagagcttgatgtacttggaaaagcggtttccaatcctgaccgcccgttcacagcgatcatcggcggagcgaaagtaaaagacaaaatcggtgtaatcgaaagtcttcttgataaagtagacaacctgatcatcggcggaggtcttgcttatactttcgtaaaagcgcttggctatgaagtcgggaaatctcttcttgaagaggataaaatcgagcttgcgaaatcatttatggaccgcgctaaagaaaaaggcgttaacttctacatgcctgaagatgtactcgttgcagatgatttctctaacgatgcaaacgtgaaaattgtgccgatctctgaaatccctagtgatttagaagcaatcgacattggtacgaaaacacgcgaaacgtatgctgacgtcatcaaaaacagcaaacttgtcgtgtggaacggaccaatgggcgtattcgaaatcgacttgttcgctcaaggaacaaaagcggttgcggaagcattggcagaggcgaaagatacatactctgtcatcggcggaggagactctgcggcagcggttgaaaaattcggccttgctgacaaaatgagccacatctcaacaggcggcggcgcatcccttgagtttatggaaggcaaagagcttccaggggtagctgcactgaacgataaataatctcaaaactgctataaggaagtggaacagatgagaaaaccaattatcgccggtaactggaaaatgaacaaaacactcggcgaagctgtcagcttcgttgaagaagtgaaatcttccattccagcagcagacaaagctgaagctgttgtttgcgcgccagcgcttttcttagaaaagcttgcttctgctgtgaaaggcactgacctaaaagtcggcgctcaaaacatgcacttcgaagaaagcggcgcgttcacaggcgaaatcagcccggttgctctgaaagaccttggcgttgactactgcgtcatcggccactctgagcgccgtgaaatgttcgctgaaactgatgaaacagttaacaaaaaagcacacgcagctttcaaacacggcattgtgccgatcatctgtgtaggtgaaacgcttgaagagcgtgaagccggcaaaacaaatgatcttgttgctgaccaagtgaaaaaaggccttgctggtctttctgaagaacaagttgctgcttctgttattgcgtatgagccaatctgggcaatcggaacaggcaaatcttctacagcgaaagatgcgaatgacgtgtgtgcgcatatccgtaaaaccgtcgctgaaagcttcagccaagaagctgcagacaagcttcgcatccaatatggcggaagcgtaaagcctgcaaacattaaagaatatatggcagagtccgatattgacggtgctttggtcggcggcgcgagccttgagccacagtcattcgttcaattattggaggaaggtcaatatgagtaaaaaaccagctgcactcatcattcttgatgggttcggattacgtaacgaaacagtagggaacgcagtcgctttagcgaaaaaaccgaattttgaccgctattggaaccagtatcctcatcaaactttgactgcttcaggcgaggctgtaggtcttcctgaagggcaaatggggaactccgaagtaggtcacttaaatatcggtgcgggacgtattgtgtaccaaagcttaacacgcgtaaatgttgccattcgtgaaggagagttcgaacgcaatcaaacattccttgacgcgatcagcaacgcgaaagaaaacaacaaagccttgcacctgttcggtcttttatctgacggaggcgtgcacagccatatcaatcatttattcgcactgttaaagcttgcgaaaaaagaagggctgacaaaggtttatatccatggcttccttgacggccgtgatgtaggtccgcagacagcgaaaacgtacatcaaccagttgaacgatcaaatcaaggaaatcggtgtaggtgaaatcgccagcatttccggacgttactactctatggaccgcgacaaacgctgggaccgtgtagaaaaagcgtaccgcgcaatggcgtacggcgaaggcccatcttaccgcagcgccctggatgttgttgatgattcatatgcaaatggtatctacgatgaattcgtgattccatctgtcatcacaaaagaaaacggtgagcctgttgcgaaaatccaagacggcgattctgtgattttctataatttcagaccggaccgcgccatccagatttccaacacgttcacaaacaaagacttccgtgacttcgaccgcggcgagaattatccaaagaacctgtatttcgtctgcctgactcacttcagtgaaacagttgacggctatgtagcgtttaaaccgataaatcttgataacacagtcggagaagtattatctcagcacgggttaaaacagcttcgaattgcagaaactgaaaagtatccgcacgtcacgttctttatgagcggcggccgtgaagctgaattcccgggtgaagagcgtattctcatcaactcgcctaaagttgcaacgtatgacttgaagcctgagatgagtgcgtatgaagtgaaagacgcgcttgtcaaagaaattgaagctgacaagcatgacgcgatcattcttaacttcgcaaaccctgatatggtcggccactccggaatggttgaaccaacaattaaagcaattgaagcagtggacgaatgcttgggcgaagtcgttgacgcgatccttgctaaaggcggacacgctatcattaccgctgatcacggtaatgctgacattctgattacagaatcaggcgaaccgcacactgcgcatacaacaaacccagtccctgtgattgtaacgaaagaaggcattacgctgcgtgaaggcggaatcctaggcgaccttgcaccaacgttattagaccttcttggtgttgaaaaaccgaaagaaatgacaggaacatctttaattcaaaaataatttgaaaatcaaaaggagagacaaaactcatgccatacattgttgatgtttatgcacgcgaagtattagactcccgcggcaacccaacagttgaagttgaagtatatacagaaacaggagctttcggccgcgcattagtgccaagcggagcttctacaggtgaatacgaagcggttgagcttcgtgacggcgacaaagaccgttaccttggaaaaggcgtgttaacagctgttaacaacgtaaacgaaatcattgctccagagcttcttggctttgatgtaactgaacaaaacgcaatcgatcagcttttaatcgagcttgacggtactgaaaacaaaggcaaacttggtgcgaacgcaatccttggcgtatctatggcttgtgcgcgtgctgctgctgatttcttacagattcctctttaccaataccttggaggattcaactcaaaaacgcttcctgtaccgatgatgaacatcgtaaacggcggagagcatgctgataacaacgtggatattcaagaattcatgatcatgcctgtaggtgctcctaacttccgtgaagcacttcgcatgggcgctcaaatcttccacagcctgaaatcagtattaagcgcaaaaggcttaaacactgctgtaggtgacgaaggcggattcgctccaaaccttggttctaacgaagaagcgcttcaaacaatcgttgaagcaatcgaaaaagccggcttcaaacctggcgaagaagttaaacttgctatggatgctgcatcttctgagttctacaacaaagaagacggcaaataccatctgtctggcgaaggcgttgtgaaaacatctgctgaaatggttgactggtatgaagagcttgtttctaaatacccaatcatctcgatcgaagacggacttgacgaaaacgactgggaaggccacaagcttcttactgagcgtcttggcaaaaaagttcagcttgttggtgacgacctcttcgttacaaacacgaaaaaactttctgaaggtattaaaaacggcgtaggcaactctatcctgatcaaagtaaaccaaatcggtacattgactgaaacattcgatgcgatcgaaatggcgaaacgcgcaggctacacagctgttatctctcaccgttctggtgaaactgaagacagcacaatcgctgacatcgctgtggcaacaaacgcaggacaaatcaaaacaggtgctccgtctcgtacggaccgtgttgcgaaatacaaccagcttcttcgcatcgaagatcagttggctgaaactgctcaataccacggtatcaactctttctacaacttaaacaagtaataaaaagaccgccgggattttctctcggcggcttttttatgctttcagagatccaaataaagccttaccatatcgcggcattgaatcccgttttcaaaaatgtcctcatcataatgtctgagaaagaaatcgtggtcgatcgcctgaatgcggaatccgcatttttgatagagggaaagctgatgaatgctcgaattccccgttccgatttcaatcgtgtccgcccccagcttcttcgctttttcgatggcgtcaagtacaagctgtttgccaaagcctttcttctgaagagattcttttaccgcaatatttacaatttcaactgtttgcggccttgtttttagcaatacataaacccctgcaagctcatcaccggcccaagctgtgtaacattctcccctctcaagatattcatctacaatgtctttcgatggatcggcgagcagcaatagatcatataattcgtcatttgtttcttctcctaattcaatcctgagcttttgcatattcattccacctttttagtctgatagacatttaattttttcattcgttcccaatttcattctgttttattataaaatatgaaaagcagtaaatgttatcaaattagtagaataggaggaaagtcatgttattttgtaagaattgcggctcccagaataatgaaggagccaagttttgtaaacaatgcggcaccccgatcggagggggcagcaaacaggcaaatcaagaaacagctagcactgcagaaacgaggcaggctccgcgaaaaccgatccctaagaaaaccatcattttatggagcagcattgccgcggcgtgcgttatattattcgccgcatataaaaccggagcgtattttacttcaaaggataggttagtagacaagtttgaacaggccgtaaatgatggggatcaggaccaaatcgcgactctgcttacaccggtaaatgacaatcttaaactcactaaaaataatgtaaaaccgtttcttacatatttgaaggatcatccagacaaaaaagatgaactttttgcatcgctgcgtgatgaaacagcccagaaggatatcgtatatgcggaaaaagacgggaaaagcctgctggtatttgaccattatgacttaaaggtagcacctgtttattttgaagtgagcagcaattataaaaataccgatctatatgtcaataaagaggaagccggatctgtaaagaaagcagatcaagcacaaacccttggtccgtacattcccggcgaatatacagtctcagccaaactgaaaaacgatgtcgttgaccttgtgaaaaaggaagacattcaggcgattggcgatagcagctttcgtgttgatctctcattggaagcagacgatgtgacattcagcttagcgaatgacatcaagagcgggaagggagatttgctgattaacggtaaatcaattcataaagatccgttcaaatccgtaacatatggtccgctgctgacagatggatcaatgacagcttcagtcgaggcagaatttccgtggggaaaaacaaaaactgccggcgttccgatcgatgataaagaaatggagttaacgttaattcctgatcaagatacacaggaacagattatgaacacaattgtcaaaacaacaaaacaatactccaaagctctatctgatgggaatacagcccagatgacagaggcaagtgccaattggaaggcggagacgaaggacaccgtcgattctatgaaaagcgcggattcatacttaaaagatagatacttggaaactgattttgacctggacacatttgccctctctcagaaaaacgacggaacgtggcaggtatcggtaacaggaaaagaacttcaccagtcttcttcgtataacgactatacaaagtctgaaatgactgacgacagtccgagttatgaatatcttctttcatatgataaaaaacagaaaaagtggattttcgaagatgcagaatcaacattcgaatctgcaggcacaaatataaagaaaatcaaaaatgataaaccagagacatacacttccgcctgggctggctcgaaaaacaaaggcagtgaaagctctgcaagcggcgatgttacagatgaacaagtgacattatttatgggcagttatctgcaaagtcaggcagatgccgtgaatcaaaataatttctcactgatggaagacagccttgaaaaaggcagttccctttattccgaccagcagcatctcgtgtcgaaattaaataaagaggggacaacagaagactttaataactatgaagtgaaaagctggagccaaaatgggtcggctatcacgattaagacgtatgaagaattctatatcacaaaatcaggcggcagtccaaagctcagaacatataactggacctacaccggcgtagtgaagaacggaagaatttacttaacgtctattcaataaaacaaccccatcaccagcaggtgatggggttgtttttaaaagagcatataacggaaaatttctttgacatagtgttcgataataagctgaaatgtaacgcagatgatcagataaatcacaatcgttgagtaaatgaaatcaaccttccctttatatgaatgctggtaactgctcagcatcgcaggaggaatggcgaagaatgcaccgattaaaccaacggctaatatggtaaagcaaatgtctgtatgtaataaaaagaagaaaagggcaagaatcaaaatagccgtaaaaggaataagaaatgctccgaatcttgagaatgaatccttgaaagacacttggtttcccgcgattttcagggcgaaaaagatgcatgcatgcaggccaaatagaaataaaataaaataaatggttggctctaagaagattgctgtaaagcttacgcttccgggaccgtctgaaaaaagaatataaaacatcaaaggggtcagcaaactgaaaagaaccatcgtaatgattgcgctgatcagctgttctccgcctgttgctttacattcctgataagggcgtttcaggacggataagacaaatgaaccgaactgttttgctgcttgctttgcagcggctccagtttgagctgcatgctggtggcctgattgaccggggagcggtgatccgcatttctcacaaaaatttccgccatctgtttgatggccgcattgaggacaatacataaaataactcctttatctgtaatatagggaaaatagactaatagttttattataaaagaaaaaagttgtaaagtaatcaatattcatacaaaaaaagacacgagcacgatagcagctgtgtctttttttatctagttattaatatatttctcaaatacatccccaaaatccttaatatgatactgcgagcgaacggatgtcagccaagtgaatccgaattcggtcagctctttgtattgcgtttcaatattgacgtgctcagggcgggtatggtgaagaatcgtcactgctttatctaagctttgctccgcttgattgattaaaatgtcattttcataggttgtttcagcgatgcgaagcagtgctttataaaggtcttttaacttttcaatctggtctttgtggacatcaatgtcgaattgttcaccgcccagcttgaacttaatttcaacatccaaatccacttttccggcagtttcaagaaaaacgtcagagattttatattgcgaataaggatagcgtttcaacgttcgttttgaggaagtggcgcgttcgccgtccacatggatcagggccaggttcgtaaagcaatactcgtctgcttttgttttaatcaagaaataaattttctcattatcttcatgcatgacatagtcatctgcgtctgttttgtcatagtcctgaggttcgataatttttccgatatcagataagcccaaggcatctgccgcaatttttttgaacatctgtatacgtccttcctattcaatttgtcacttcattgtagcatggcgcgtttctgacaggctataaaggtttaccgggaaatcgcctccgggtaaaagggtggagaatcattctatttcctgtgcagagactatcaacaaggaggtatatgatgttctcatttatcgttcacgtcttcatttctttattcgcagtatcgaatccgatcggaaacgtaccgatatttctgacgctgacagaaggctatactgcagcggaaagaaaagcgattgcccggaaggcagctattttatccttttttattctcgcagcttttttggttttcggtcatcttatctttaaactgtttgatatcaacattcacgcgctccgagtggcgggcggcatattcattttcggcattgcctataatctattgaatgcgaaagaatcgcacgtgcaatctcttcaccatgatgaacataaggaaagcaaggaaaaagcggatatatcagtcacacctttatccattccgatcattgctgggcccggaacgattgcaacagtgatgagcctttccgccggacatagcggcattggtcattatgcggctgtcatgatcggcatagccgccgttattgccctgacctttctctttttccactattctgcttttatcagcagcaaactcggaaaaaccgagatgaatgtgattaccagactgatgggattaatcttagccgtggttgcggtcgggatgattggtgccgggctgaaaggcatgtttccggtcttaacttcatgatgcaaaaagcagctctcttattttagagagctgcattcttttgttttcggcacataccgaaagacttcctcactctcaaaaaattcaatcaacctgctcagccaatcatagtaatgaagccattcttttaattcattcagcagctgattgactttctcttccgcttccggggtaagcccgtccctttgtaaaagatcactcagctcccggtttaattttttatacagcactttgtttttgctcacgacctttgtccaattcgccgcaaataaagaaatgaaggtttgataataatcctgctcgacgtcataaaggtcttttcgtacgcctttttcaaacaccttttcggcgatattggcatcgatcatttcccggacaacctggctcatccgtgttttgctcatgcccgttgcctcagagagctcgcttaaggtcattggttttcgattcatataaataattccgagcacacgtccgacagttgaaggcattccaaacgtatgcatattttcggcaatcttctcaatgagatgctcttcagcatgttcaatgatgtcgagagcggtttttttcacagctgatcatcccttcaaatggcaattgatggtgtcaatatatcatatttcttcctggtgttgaaaatagctgaatgcagaggaagtgggaggtatccggagtaattgtaagaacaccctttccgtctcggtcataacaataaataatctataaataacatataatttcaacacattgtaaactttttattttacaaagttcaaactataataaggattatacttttcagaaaatttaaaggaaacctgcggaggtgcacggattgctgaaattggaacaagtgtcaaaagtatataaaggcggcaaaaaagctgtgaacagcattgatttagatattgcaaaaggtgaatttatctgttttatcggcccgagcggctgcggaaaaacgacgacgatgaagatgatcaacagactgatagaaccatcgtctggaaggatctttatcgacggagaaaatattatggaacaggacccggttgagctgaggagaaaaatcggctatgtgatacagcagattggtttgttcccccatatgaccatccagcagaacatctcactcgtaccaaagctgctgaaatggcctgaggaaaaacggaaagaacgggcgcgcgagctgttaaagcttgtggatatgggcccagagtatttagaccgttatccgcatgagctcagcggcggacagcagcagagaatcggcgtgctgcgcgccctggcagcggaaccccctctcattttaatggatgaaccgttcggagcgcttgatccgattacgcgtgattcccttcaggaagaattcaaaaaactgcagagaaccttaaacaaaacgattgtgtttgtaacccacgatatggatgaagcgattaagcttgctgacaggattgtgatattaaaagcgggagaaatcgttcaagtcggcacacctgatgagattcttcgaaacccggcaaatgagtttgttgaagaatttatcgggaaagagcgcctgattcagtcaagaccggatatcgagcgggtagagcaaatgatgaacagaacgccggtgacggtatctgcggacaaaacgctttctcaggcgattcagctgatgagagaaaaacgtgttgactcgctgctcgttgtggaccggcaaaacgtgctgaagggctatgttgatgtggaaatgattgatcaaaaccgcaaaaaagcgagcatcgttggcgatgtataccgttcagatatatataccgttcaaaaaggggcgcttcttcgcgatacagtccgaaaaattttgaagcaggggatcaagtatgttccggtggtcgatgaacagaaccatttagcagggattgtgacaagagcgagcctcgttgatatcgtatacgattccatttggggcgacgaggaaaaccagctcatgacgatctgaccaggggaggagctcttttaagatgaatcaaatgatgacttttttgcaaacgaacggcggagagctgctgtataaaacaggagagcatttatatatttcactcatagccgttgtattgggcattatcgttgcagtgccgctcggcgttgctcttaccagaatgaaaaaaggcgcaggtgcggttatcggtttcgtaaacattgtgcaaaccctgccgagtctggcgattttagccttttttattccgcttctcggcgtaggaaaagtgcctgcgattgtcgctttatttttctattcggtactgccgatcctgcgcaatacgtataccggcattaaaggtgtaaataaaaacctcctggaatcggggaaaggaattggcatgaccggctgggagcagattcggctcgttgaaatcccgctggcgattcccatcatcatggcggggatccgcacatcaacgatctacctaattggctgggcgacacttgcgtcgtttatcgggggaggcggcctcggggactatatttttatcggactgaacctataccagcctgaatatatcattggcggtgccgtgcctgtcacaattctggcaattattattgattatgttctggctgtgacagaacgaaaggtgacgccgaaaggcttgcaagggatgaaggaagtatcgtaaggagttggcactgttgaaaatgacaaaaatcaaatggcttggcgcgtttgctctcgtctttgtcatgctgctaggcggctgctctctgccgggtctaggcggcgcttctgacgatacgatcaaaatcggggcgcagagcatgacagaatcagaaattgtagcgaatatgatcgcgcagcttattgaacatgatacagatttgaatactgctttagtgaaaaacctcggctcaaactatgttcagcaccaagcgatgctgggcggtgacattgatatttcagccacgcgctattccggaacagatttaacaagcaccctcggcaaggaagcggagaaagatccgaaaaaagcgctgaacattgtgcagaacgagtttcaaaagcgcttttcttataaatggtttgattcctacggctttgataacacatatgccttcaccgtaacaaaaaagtttgcggaaaaggagcatattaacaccgtgtctgacctgaagaaaaatgcttcccaatataaattaggcgtcgacaatgcttggctgaaacgaaaaggcgacgggtataaaggctttgtcagcacatatggctttgagttcggcacaacttatccaatgcagatcgggctagtctatgacgcagtcaaaaacgggaaaatggatgcggttttggcttattcaacggatggacggattaaagcatatgatctgaaaatcttaaaagacgataagcgtttctttccgccgtatgactgttcaccggtgattccggaaaaggtgcttaaggagcatccggaacttgaaggtgtgatcaataagctgattgggcaaatcgacacggaaacgatgcaggaacttaattatgaggtggatggcaagctgaaggagccgtctgtcgtagcaaaggaatttttagagaaacatcattattttgactaagaaaagaggtggatcatatggaagtactacagcagcttggcacatactattcgcaaaacggcggttacgtgctgcaggaattttaccgccattttctgatgtcggtgtatggcgttttatttgccgccattgttggaattccgctcggcatcctgatagccagatacagaagattaagcggatgggtttttgcggtcacgaatgtcattcagaccatcccggctctcgccatgctcgccgtgctgatgcttgtcatggggctgggcgctaatacggtgatattgtcattatttctgtattctcttctgccgattatcagaaatacgtatacagggattatcagtattgagcacgcctatcttgaatcgggaaaagcaatggggatgacaaaatttcaagtgctgcggatggtcgagcttccgcttgcgctttctgtcataatggccggcctgcgcaccgcgcttgtcattgcgatcggcattacggccatcgggacatttgtcggtgctggcggtctcggggacatcatcgtcagaggatcaaacgccacaaacggaaccgcgattatattagcgggagcgatccccacagctctgatggcggtgattgccgatttggtcatgggctggcttgaacgagcattaagcccgattaaaaagaaaaaaggaaattttattatagctgatagaaaaaccacctctatttaaatacaacagaggtggtttttttaaataaacaacatgtgttagtatctgttaaacatattttccagcgttgggattatccgagtatttgaaaaaatacaaaaatcagatattataaccaatttgagggttgtttttaaaaaaattcaagttataatgaaaataatacatttatacaaatatctaaatgtctaaatgtttttttgtaaaggagaaaacgctatgaataatgttttcaaagctatatcagatccaacaaggagaaaaattttggatttgttaaaaggaggggatatgactgcgggagatattgctgagcattttaatatcagcaaaccgagtatttcgcaccacttgaatattttaaagcaagcggaagtcataagtgaccatcgcaaaggacaatttatttattactctctaaatacaacagtacttcaagactcaataaattggatgcttaactttataaataaaggggataacgatttatgaagaaaaatataatttccataattattgtatgtttgagtttcttgacttcaattatattatatcaataccttccagaagaaataccgatacaatggtcaggaaataaaccggctgcaattgtatctaaacctttaacaatatttattatacctgttgttatgcttatttattatcttactttttatatgttaactattaagtctacacaaaaaaataaagcattgcttttcctagcttctaataatatgttaatccttttatatattttacaactctcaactctattgataagtttaggatacgaagtgaatattgatttaataatagggcttggtgttggtatctttttaattattggtggaaattctatgcagctagcagaacaaaaccatcttattggattgaggacaccttggacattaaaagatgagactgtttggaaactgggaaatcgctttgcctctaaagtacttgtagtgtgtggttttataatagctgttctttcattttttacaggagaatatataattcttattatgattgtgctagttcttctagcattagttatttcaacactagcttcatatcattattacaaaaaattaaacggttcacgttgaaaaagtgtcttgcggagcaatccgcaagacactcaattataatggattattgatgaatcaattttagggtttttgcagcagccgcttctaaatcagaattattagaagctgaagaggaatatttggcaacgtatttccacactgcagttgttactgcggcagccgtttgtaatgcaactgcgttaacgcccacaacatataaatatccagctgctacacagacggcataaagcccacaagatggagtaactttattagaagagtattttacgttttcatttttcttagcatatttttggataagttggtctgctttggtcatattttcaatgagttttttagggtctttgctgtcaatcgattgtttcaattcatccatatattgtggttgatctttttttataaatttgactacatcatttactaactttttaccttctgtactatttgcctcttttacgagtttagggtccaaatcgtttgaaattaatttaccaacttccccttgtccaaataaaagtcctctaaagtaatcttctccagaaaatgtatggttttctttagcagatgtacttgactccttagagagtcctactaatgaaaaaaccaatatcgttaccatggaaacaatcaatagcctaagtaatttacttttcaaattattatacctccattaagttatttctccattatctaaatgttagctatgaaacaattttgtaagaaacttgactgattcacctcctattcttttgaaatttctctttccttttacatatatatatttaaataaaggagaacaccaattcatagtgatattttgttgtacaggatgcagatatataattaatgctgatatcatgatcaagccaaaacttacaataccaatgctgaatattatcccaatatgaaataatattcccaaaacaagggcaattctctttattctgatatttgaaattatgcttgctgctaagaacaactcaaaaatagttactaaccaagtgatgacaacaataaaattgctttcaagtagtggattcattaagttaagttgatattcaggtaatccaaacaccggatcagaaaagaaatagtaaattgctgttccttctgcccactctttatttttcaatcgctctaaagctgcgtttaaataaatgataaaaacttgaattttaattattgtcattatataaaacaatactgtcttctttgtgaaagattcattattgtttttctttatattccaatgatttcgccttgaatctaataatgtaacaggtaatataagaaaagaaagaacagttgcaatttgctctccaccatcgatagttaaagctgaagtttgaatactatagcaaatataccagtgaaataaaccggtaaatctaggtctccaccctataaccactaaggttaatataaaaatcattaagtatcttataatctcaaaattgatactatattctttagcaaaacaaaaagcggtagggatatagacattttcacatgtgacattatttgcactataactaaataaaatatcagtactattgaataatagtactagtaatgttgagaaaccaagtaaacttctaaaaagtgcatatgtatttttccatggattataggtgtcaatataaccttctaaactatttaatatcttcatactatttttatttttagcacctttctttcaaaagaggtagtttgcttaaagtctatccaataccatgagagtggtttttggcgatatattaggtattctcctttgctaagatgtatataatcttcattttttataaccttaataggctttatttgtttctctaaatttgtgcaggagttgttgttttcacaagttttccaattctttggatcgatattctctacaattttgcctaattctattgcctgaactcttccttctctttttatcccaaaaaaattattgggaagtgcattaggtaactttaaattttcttttgtgtgaaatgaaatgttttcttctgtagggcttttactataaaagccaaagccttggggagacaattgttgcaaaaaattttttttgaacagtggattctgaggtgaaatattgctaaagtaataagaagaaaataataggaaacatatagtcattacagtaataattcccttttttttgatgtagattacctcctctaagctaatataatcatttcaaaaagattatataatagctagtcagaataatcaacaaaaaatggataattaataaattaatgtaaattatgcattattttgtttgttttcttgaagtttgatattcaaccatttggattggacttaaaaaagttcccagaattgaatttgggaactttttacggcttcggcacatatttaaaaatgtcttcgctctcaaaaaactcaatcaaacggctgagccaattataataatcgagccattcctttaattccttcagcagctcattcactttttcttccgcttcaggagtaagctcttcatccaacacgctaagcagctcccgattgagttttttatgcatcattttgtttttgctgacgactttgctccaggtggctgaaaacagcgtgataaatgtttgatagtagtcctgctcaacctcatataaatcttttcgcacgcctttttcgaataccttctcggcaatgttggcatcaagcatttcccgcactacctggctcatacgtgttttactcatgccggtggcctcagataattccgtaagcgtcatcggttttcgattcatataaataatgcccagcactcgtccgacggtagagggcattccaaatgcatgcatgttttccgcgattctttctataaaatggtcctcggcttgttcaatgatcgttaacggatctttctccaacggtttcatcctttcagctaacaattccgatgtcaatataccacatttttgatacggcgaaaatgctgtcaaaagagaatttggcaggaaattggagcaataaggagatcaacacacgtcaatgcgggtaaatcagcgtttacacatactttataaataatatgaacaaattgtaaactttttattttataaactttattctataatgggaagcattcaattgtctgaaaaattaaatttaaactgaacaaattgaataaacttaattttggaggtgcgatgtttgctgacattagaaaatgtctcgaaaacatacaagggcggcaaaaaagccgtgaacaacgtaaatcttaagattgcaaaaggcgaatttatctgctttatcgggccgagcggctgcggaaaaacgacaacaatgaaaatgattaaccgattaattgagccttccgccgggaagattttcattgacggcgaaaacatcatggaccaggatcctgtagagctcaggcgcaaaattggctatgtgattcagcagatcggcctgtttccccatatgaccattcagcagaatatctcactcgtcccaaaactgctgaaatggccggagcagcagcggaaagagcgggcgcgtgagcttttaaaattggtcgatatggggccagaatatgtagaccgttaccctcatgaattaagcggggggcagcagcagcgaattggtgtattacgggcacttgccgcggagccgccgcttatcttaatggatgaaccgtttggggcactcgacccgattacgagggattccctccaggaagaatttaaaaaactgcaaaaaaccttacataaaaccatcgtatttgttacccacgatatggatgaagcgattaagctggcagaccggattgtgattttaaaagcgggagaaatcgttcaagttggaacgcccgatgacattttaagaaatccggcagacgaatttgttgaggaatttatcggcaaggagcggctgattcagtcatccagcccggatgttgaacgggttgaccagattatgaacacacagcctgtaacgatcaccgcggataaaacgctttctgaggccattcagctgatgaggcaggaacgggtcgattcattgctggtcgtcaatgacgagcgcgttctgcaaggctatgtcgatgttgaaatcattgatcaatgccggaaaaaggccaatctcgtcagtgaagttttacatgaagatatatacacagtactgggcggcacactgctgcgcgacacggtccgcaaaattttaaaacggggtgtcaaatatgttcccgttgtggatgaagaccgacgcctgatcggaattgtgacgagggcaagtctggtcgacatcgtgtatgactccctctggggagaagaaaagcagctcgcagcattgtcatagggaggggcgataagtcatgcatcatattgttcaatttttgcaaaccaatgggggagagcttctttataaaacatacgagcatattacgatatcgctcattgctgtgatcttaggtgtgctggttgccgtccccctcggggttgtgcttaccagaatgaaaaaaggagccggcaccattatcggcattgtcaatatcattcagacgctgccgagtctggccatcctcgctttttttatcccgctccttggtgtagggaaggttccggccattgtggctttgtttttctattccgtattgccgattcttcgcaacacgtataccggcattcgcggcgtcaacaaaaatctgctcgagtctggtaaaggaataggaatgacgccggctgaacaagtccgcttggtggagctgccgcttgccgcaccagtgatcatggcgggaatcagaacatcgacgatttacttaatcggctgggccacgcttgcttcctttatcggaggcggcggattgggtgattacatttttatcggactgaatttatatcagccggaatatatcatcgggggcgcggtacctgtcacgatattggcaattgtgattgattatgtgctggcagttgctgaacgaaaactgacacctgccggcatgcagagattgaaggaattgtcataaggaggcggctcatgaaaagaaaatatctcaaattaatgataggtttagcacttgcggcaacgctgacgctgagcggctgttcgcttcctggtctcagcgctgctgcagaccagaccattaaaatcggcgcgcaaagcatgagcgaatcagaaatcatcgccagcatgcttggccagttgatcgaacaccatactgatctcaaaacaacaacgattaaaaatcttggctccaacgcggtgcagcagcaggctttaatgaacggggaaatcgacattgcggccacaagatatacgggagacgcgctgacaggcacgttgagaatggaacctgaaaaagatccggacaaagcgctggcgcttactcagcgggagtttaaaaaaagatatgatttaaagtggtatgactcctacgggtttgataatacatatgcctttacagtcagcaaggagctggccgaccaataccatttagagaccgtatcagacgttaaaaaatgggcgccgcaattaaagctgggcgttgataactattggatgaagctcaaaggaaacggctatcaggattttacgaaaacctacggcatgacattcggcggcacgtatccgatgcagatcggccttgtgtacgacgcggtgaaaagcggaaaaatggacattgtgcttgcgtattcaaccgatggaagaatcaagtcctatggtctcaaaatgctaaaggatgataaacaatttttcccgccgtacgactgctctccggttgttccggaaaaggtgctcaaagaacatcctgaacttgaaggcatcatcaagaaaatgctcggaaaaatcgacacagccacgatgcaggagcttaactatgaagtcgacggcaatctcaaagaaccgtctgtcgttgccaaggaatatttagaaaaacatcgctatttcgaatcgtgaaagggggaagaggtcaatgaacgtgcttgaacagttaatgacgtattacgcgcagaatggcagttacgtcatggatgaattcggccgccactttctcatgtcggcttacggcgttttatttgccgctgtcgtcggggttccggccggaatcctcatcgcgcattttcgccgtttgtcagcctgggtgtttgccgtaacaaacgttattcaaacaatcccggcgctcgctatgctggccgtcttaatgcttgttatggggctcggcgcaaataccgtgattctatcattatttctgtattccctgctgccgattattcgaaacacgtacacaggcattatcagtattgaacatgcctacttagaatctggaaaagcaatgggcatgacgaaattccaagtgctcagaatggttgagctcccgctcgcactttctgtcattatggcgggccttcgcacggctctcgtcattgccatcggaattacagcgatcggcacatttgtcggtgccggaggccttggggacatgatcgtacgcggctcaaacgcaacaaacggaactgcgattattctagccggagcgataccaactgcggtgatggcggtaggggcggatttgctcatggcttggctggagcgggcattaagtccggtgaagaaaaaaagaaccggggcgaaacatgttcaatcagctgcatagaatagaaaaagaggctggagtccagcctcttttttctctttaaatcgtaaactgacccatcttctcattaagctcattggccagctgctcaagctcttcagcatttagaagcacttgatccatcgaatgggcggattgctcggtaattgaaaatgtttcttcaatgccggcggcagactcttcggatacagaagcgatattttcaatcgattgattgatggtaatcgattggtttgttaactgcttcaagccatccgttacttccttaatgctgtctgcaacatgggtgacggattgtttgatatgctgcatagcctgtccggtgtctgtcaggttttccgttcctttttcgacttctgtaaagctgctttccaagtacgtaatgacagtgtggatctcctgctgtgtcccgtttacaatccgggtaatgtcctgcacggaatcagaaacgccgtcagccagctttctgacctcctctgccacaacggcgaagcctttgccgctttctccagcgcgggcagcttcaatcgcggcgttaagggacagcaaattcgtctgctcggcaatcccgttgatgacctgaacgagcttgttaatatcctgagaatgctgttccagtgatctcactttatgcacggcttcttcaacaatatgatggatggttttcatttgctgtaatgacgtagccatattttcgttcccgcttaccgcgagttcgagaacgttttgagacgtatcgctgattgtgatgccgtgattataggctttatcaatgctttcggtaaactcattcatcgattcggcaatcgtcaccgcgtcttgggcctgctgttcagagccctcagccatttcgttcatcgtctcggtaatatgtttgctgccggatcttgtttcattcgttgcggttgcaagcacctgtgaagaagaaagaacccggcttgatatgtctttagaatatccgacaatatctctcagattccctaccattttttgcagcgcttcattcagatcacccagctcgtcttttgagttgagggcctccatatcgttcgacaaatcgccttcggcaatatgattggcagattccttcatgcgaatgataggctttacaatgtttcgcgtgatataaagccagatgaaaatgctgatgaggattgatgctgccacaagcaaagcagtgtaaatgagccctttatgatagacggccttcgtttcttttaccgctgtgttgctgccttcttgatttaagtcaacaagctgagtgattgtttttttcatatcctcaaagctggcctcagtctgaaccaataaacctcttgctttgtccatgtcattcgtgcggccgctttcgataatttgcgcatgaatatccatataggtattcactttagtttgaagctgctcgaacagtttctgctctttatcagtggagatcgttttttcgtagttatcgagcttttggttaatgtcttccatgatttgattcatttcttgatcaagtgtatccattttacttttgtctgtataaatcagaaagtccttttctttagaagacaggtgctcggttacataattaattgaagtgattcctttgatgccgtcaatccattttgtgttgatttcatctgttttttgaatgatatgctgcatattaagaacgcctattccgcctacaagtaaattgatcaggatcagtgtcaaaaataccaggctgaatttgcgggaaatcgtcagtcgcatatagtggtctcctttaaaaacgtaatgtgtggatgtactatatatcggctgagatatctttttttcacctggaaaataaaaaacggttcttttctcgtctttgagatcagaaccattttagcaattagtcaagaaaggaagggtcaatccattcagtcgcccatttagaaatctcacctaatatgggtgctagtgcctttcctttatcagtcaatgaatattcgatgcgaaccggagtttcagggatgacatcccgcttcactactccttcaagctcaagttctttcagccgttctgacagaactctgccgcttagatttggaagtgctgcttcaatttcgctaaatcgctgcgacccgttcaagagctgaaatacgattaaagcgacccagcgtttacttaagatgtcgactgctttttcaaatctaggacacatttctgattggttcatacttttcacctcgtctgtcactattataacgcaaataacgagggagggcatgcaagcgtgattgataaaatatagaaagagaaacaggggattatgaggaagaggcgcgtttttttgcttctgaagacaaaaaatcgaagtatttgctgagattttcaatatcctgctttgagagatgttcccatttttgactattgaaaatcgggaggtgctccgctccgcgtgtgacagccgtctggtaaatttcataaacggattgatagccttcagatgcttcgcggatttcttcaggaaaggcctgaatatggcctgcggcggccattaggttttcgtacggcactttcaggacggctgccagttttttaatcgtggcgggttttggcgtcccgcgtttgccgttttcaatttttgaaatggtggccgagctgatgcctgagtacaccgcaagctgattcactgtcagtttgcgggcgcggcgcagctcccgtaattgctgtccgaacggtgacatggtctatcgcctcacatttctatcaagagtcagtcatcagcagaccgttttttcgcttcatctgaaataaacgaaaaataatgatccagcatgagcaaatcttctttattgagatattgccacttttcgttctcaagaagcgcaaggtttttcaggtcataggcctccgctttttcaagcagcttgcacttcgtttcataaggggccctggcttcatgcacttcttcgatgtaaccagccttgtacataagcccctcataaggaatttttaaggcctctgccagttttttgatggtggcaggtttgggaacgccccgttttccgttttcgattctggagatgccggccgcgcttacgcctgaataagtcgccagctggttgactgttaactttctctcttcacgcaatgcccgtaattgttcgccaaagctttccatatatctcaccccgtccctcactgttactcatattttagtatgtttattgactaaagggaataggtagactggaaatgtattgacaaaagttaacataagccgtaatgtaaaagtatagaaaaaagtttttcaggaatggaaggtgaggaaagtgccagtagaaaagatacagattagacgtgattatgtcttgcagtatatggttaataacgattattcccttaatcagcttgcgctggaaatcggagtctcacccgccacactgagccgcgtgctgaatggagaaagaaggccggggcagcttgtgattggtaaaatgcttcactattttaatttgaaatttgaggatcttttttactatgatttcgttgacaaaagtcaataaagtaacaaaaaacgcaaggaagccaagcgttttctattcctatgaatgatgtgtcagcacaaaccctgtcaccagctcattgcacgttttccattgttttgtcggcaattgatgtccctgatattccaatctgaaaaattcggcatgtctgcacgatcttcggtaatagcctgcgtttgtaaaggtccagtcccgcaggccgccatacataaacagcattggcatttctaggcggggcagctgttcaatgcagttgtagccaagcgaatccagataatactgatgccaatgggcctggtctgcttttttcatatggtctgttaatatgctgcgaagctgtctgtcttttgtgtggctgccagcgaggattttcatgagcaaaccggggtttttttcaagcagatacattcccagtttgtgcagcttctggccgattacgttatgaacagcggggtaggcgccggacagaataaggtgtgacactttgtccgggcgggtgaagccgatatgctgcgcgattaagcctccggcagaatacccgaataacacagctttatcaatgtgcaaagcgtccatgaattgcgcgatctcgtttgcgtaataggaaatagacgctggctgatcgatgtgatcactatcaccgtggccacttaaatccggaaaaatcaccctgaaatgcttggatagaaggcgctgataataaaaaacctttcgtcccatgcccggcgggtggataaaaatgatagggattccctgtccatattcttcataaaaaagatgtttcctgctgtctatgctgataagcggcatcgcttttctcctttgaccttttcatatgaatagggtaaccaagataaaacgtcttatccggccttttggcgtctgatacagcgtgacatgccaacccttttcatgtaaaatagaagtaatgtagccagtgagtctggaggtgtatgggatgcacgcagttttgattaccttattggttatcgtcagcattgcacttattattgtcgttttgcttcaatccagtaaaagtgccggattatctggtgcgatttcaggcggagcggagcagctcttcgggaaacaaaaagcaagaggtcttgatttaattttgcaccgcattacggtagtgctggcagtcttgtttttcgtgttaacgattgcgcttgcttatatcctatagggcaatgtttgtataaggtctgatgtgaagtcaggcctttttcacgtttctggatgatattcaaaacgtttttttctgattaaactgtggaaaactaaaatgatcgtgcagatagaaagggagacatgagcatgaaagttgtgacaccaaaaccatttacatttaaaggcggagacaaagcggtgcttttgctgcatggctttacaggaaatacagcggatgtaaggatgctgggacgatatttgaatgaacgcggctatacgtgccacgcgcctcaatatgaaggacatggcgtcccgcctgaagaacttgtacatacggggcccgaagactggtggaaaaacgtaatggatggctatgaatatttaaaatctgaaggttatgagagcattgctgcctgcggactgtcgcttggcggggttttttcgctgaaattgggttacactgtacccataaagggaattgtcccaatgtgcgcaccgatgcatattaagagtgaagaggtcatgtatcaaggcgttctttcatacgctcgcaattacaaaaagtttgaggggaaaagcccggagcaaattgaagaggaaatgaaagaattcgaaaaaacgccgatgaataccctcaaggcgctgcaagacttaattgctgatgtgcggaataatgtcgatatgatttattcaccgacatttgtggtgcaggcccgtcatgaccacatgattaataccgaaagcgccaatattatttacaacgaagtggaaactgatgataaacagctgaaatggtacgaggaatcagggcatgtcattacactcgacaaagaacgtgacctcgtccatcaggatgtgtatgaatttttagagaagctcgattggtaatcaacaggaggtcggataatggaaaaagaagcatttatggaaaagcttctctcgtttatgaaggaagaggcgtacaaacctctgaccgttcaggaacttgaggagatgttaaatattacggaagccgaggagtttaaagagctcgtcaaagcgttagtcgccttggaagaaaaagggcttatcgtacggacgagaagcgaccgctacggcattccggagaagatgaatttaataaaaggaaagatttcagcccatgcgaaaggattcgcctttttgctgcctgaggatacgtcgttaagtgatgtgtttattccgcctaatgagctaaatacggcaatgaacggcgatatcgtcatggtgcgtctgaactcacaatcaagcggctccaggcaggaaggaaccgtcatacggattttagaaagagcgattcagcgggttgtcggcacgtatacagaaacgagaaacttcggctttgtcattccggacgacaaaaaaatcacgagtgacatcttcattccgaaaaatgggaaaaatggagctgcggaagggcataaggttgttgtcaagctgacgagctatcctgaaggccgcatgaacgcagagggtgaggttgaaaccattctcggccacaaaaacgacccgggcattgatattttatcggtcattcataagcacggcctgccgggagaatttccagctgacgcgatggaacaggcatcaagtacgcctgacacgattgatgaaaaagatctgaaagaccgccgtgatctccgtgaccaggtgattgtcaccattgatggtgcggatgcgaaggatttggatgatgcagttaccgtgacgaagcttgatgatggaagctacaagcttggcgttcacatagctgatgtcagccattacgtaaccgaaaactcgccgattgacaaagaagcgcttgaaagagggacaagtgtgtatctggttgaccgtgtcatcccgatgattccgcacagattgtcaaacggcatctgctccttaaatccaaaggttgaccgcctgacgctttcttgtgaaatgacaattaacagtcagggacaggtgacagagcacgagatcttccaaagtgtcatcaaaacaacggaaagaatgacatattcagatgtgaataaaattcttgttgatgatgatgaagagctgaaacaaaaatacgagcctcttgttccgatgttcaaagacatggagcgtctggctcaaattctgcgcgataagcggatggaccgcggcgccgttgactttgatttcaaagaagcaaaggtgcttgttgatgacgaaggagcggttaaagacgttgtgatcagagaacgctctgtcgccgagaagctgattgaagaatttatgcttgtagcaaacgaaacagttgcggagcatttccattggatgaatgtcccgtttatataccggattcacgaagagccgaatgctgaaaagctgcaaaagtttttagaatttgtgacgacatttggctatgtggtgaaaggaacggcggggaatattcatccgcgcgcgctgcaaagcattctggacgctgtgcgtgacagaccagaggaaacggttatatctactgttatgctccgttcgatgaaacaggcgaaatacgacccgcaaagcttggggcacttcggtctgtcaacggaattctatacgcatttcacatcaccgatccgccgttacccggacttaatcgttcaccgtctgatccgaacgtatttgatcaacggcaaggtcgatgaagcgacacaggaaaagtgggctgaacgcctgccggatatcgccgaacatacatcatctatggagcgccgtgcagttgacgccgagcgtgagacggatgatctgaaaaaagcggaatacatgcttgataaaatcggtgaagagtttgacggcatgatcagctctgtgacaaacttcggaatgttcgtcgagctgccgaatacaattgaaggactcgtccatgtcagctttatgacagatgactactaccgctttgacgaacagcatttcgcaatgattggcgagcggacaggcaacgtcttccgcatcggggatgaaatcacagtcaaggttgtcgatgtcaataaagatgagcgcaatatcgactttgaaattgtcggcatgaaaggcactccgcggcgtccgagagaattggacagcagccggagcagaaaacgcggaaagcctgccagaaaacgtgttcaaagcaccaatacacctgtttctccagctccgtctgaggaaaaaggggagtggttcactaagccgaagaagaaaaagaaaaaacgcggcttccagaatgctccgaaacagaaacggaaaaagaagaaatagcagctcaaccagcaaatagggccgcagcgctctatttgctttctttcggaaacagcttttcattgtagcggtacgtgacatttggtaaaatagagcgtatcgcaaaaggtggacagtttttccttagagagaggaggttctggcatgccaaaagggtcaggaaaagtattatctcaaaataagaaagccaaccacgattattttatagaagaaacctatgaaacaggcatcgttctgcaaggaaccgaaatcaaatcgattcgcgccggccgcgtaaaccttaaggattccttcgccaaaatcgaacggggagaagtgtttctccacaatatgcacgtcagcccatatgagcagggaaaccgctataaccacgatccgctccggacaagaaagctgttaatgcaccgcaaggagattaataagctgatcgggttaacaaaggaaaaaggctattctctcgttccgctgaagctgtatttaaaaaacggctttgccaaagtgcttctcggccttggaaaagggaagaagaactatgacaaacgggaagatctgaagcgcaaggacgcgaagcgggaaatcgaaagagcgttcagagacagtcaaaaaggcttctaaaggcatagtgcttgattcgaaaatcaggcctgtgctatactgtgttcacgatcagatcacgacgccattcatttgaaggatttgacaattgaaaagagccgtgatcatgttataataagactatagccagtttgagtgagagcttgatattttctcccgtatttcccttataccaaggggacgttacggattcgacagggatggatcgagcttgagctgcgagccgagaggcgatctcgtaaacacgcacttaaatataactggcaaaactaacagttttaaccaaaacgtagcattagctgcctaataagcgcagcgagctcttcctgacattgcctatgtgtctgtgaagagcacatccaagtaggctacgcttgcgttcccgtctgagaacgtaagaagagatgaacagactagctctcggaaggcccgcccgcaggcaagaagatgagtgaaaccataaatatgcaggctacgctcgtagacgcttaagtaatcgatgtttctggacgtgggttcgactcccaccgtctccatacatactgacaataaagcagaacctcttaagaggttctgctttattttttctccaaaccacaggcaccaaaaagtgcgtacttccatttcaatcccagctgtttcatactgattgcagagcagatgtttcaccaatcagatttctgtcaataaataagaggaatcaaaaacggagggatgaataatgaagctgaatttacaaggaaaaaccgcactggtgaccggttcgacatcagggatcggaaaagctattgcctcttcgttagctgaagaaggtgcggcagtgatcattaacggacgccgggaagagaaagtgaatcaaacgatagatgaactgaaaacacaacatgctgaagcggttctttatccggctgcatttgatttgggaacagaagaaggctgcaatgagctgtttcaggcatatccagaggttgatattttggtcaacaatttagggatttttgaaccggcggagtactttgatattcccgacgatgaatggtttcgtttttttgaagtgaatattatgagcggtgtaaggctgacacgcaggtatttgcataacatgatagagaaaaaagaagggcgtgtgattttcattgccagtgaagcggcgattatgccgtcacaggaaatggcccattacagtgcgacaaaaacgatgcagctgtccatttcccgcagtttggcggagctggcaaccggcacgaatgtcacagtcaacaccgtcatgccgggctctaccttaacagagggtgtggaaaccatgctgaactcgctgtatcctggtgaaaacctgactgttcaagaagctgaggcacgttttatgaaagaaaaccggccgacatctattattcaaagactgatccgtccggaagaaatcgcccacttcgttacatttttaagcagtccgctttcctctgcgatcaatggcgcggcacttcgggcggacggcggtttggtccgcagtgtcttttaaacctctcccaataggagaggtttttttatatattgttgatttccataaatttctgccgtataatattggtaccgaaatagttttcttggtaccgaaagcgggggattaatatggataaaagaattctggcggaaaccttccggctgatcaagcagaaaggattttcatttacgatgaatgatttggcggcagcgctgggaacgagcaagcggacgctctatgcatattattcatctaaagatcagcttgttgaggcggttgtcgaacaatttatagctgaaatgaagcaaatagaaagagacatctatgaaaatgaaagtttaaatgtgctcgaaaaggtgaaacaaatgctgatcagccttccgcaggggatggaactgctgaacatgggattattaaatgaactaaagaaataccattacgatgcgtggcttacattagacgcgtttattaaggaagaatgggcgattgtcctagcattattaaatgagtgcaaacagcaaaagagaatcagaaacatcaatccggacctgtttgttcacatgtatatagggagcatcaatcaagtgtatgaccctgaatatccgctgaaacatcagttcacgacaggagaggtacttgaatcaattgtagatgttttgtttaacggtataacagctgatgaggaggctgatgccacatgaattgggtgtttctatgcttggcgattttgtttgaggttgcgggaactgtcagcatgaagctatcgtctggttttacaaagcttattcccagtttgctgttgattttcttttatggagggagtcttttctttctgacgcttacgcttaaatccattgatgtatcagttgcttatgctgtatggtcagggatgggaattgtcttgattacagtcgttggttttttgttttttcaagaacatgtgagtgtcatgaaagtcatttcaattggattgattattgccggtgttgtgtctttaaacctgatcgagcatgttgcggtgtctgagccggtacataaaagcgggcagtacaaatgagatatatgaagctgttttttctcgtgactgatatcggttttatcttgtactggctgtcagccggattttcgctcataccggaaagctgggcttttaaacatcatgaccatccgtttatgatcgcttggaactggtctttttttccgctggatatcctgatttctgtcacagggttgtacagcttgtacctacagcgggtgaatcgtgctgactggaagctgatggcgctgatttctcttgtgctgacctgttgttcaggtctgcaggcgctatcattctggacattcagcagtgactttgatcttgtgtggtggctgtttaatgggtatctattgatttatcctttattttttattcacctgctcttgaaggaaggcagaaggacaaaacagtcctgacaggtgccgcttttataataaactgatgtaatgaagcagagacggtataagtctctgtttttttatcgtgcgcaccaattgagaagctaaccgcgtttttgggcatactaaagcgaagaaactggaaaagttctacacattcattgaaaaggattttgtcaaatgaacaaaactgctgcgaacaatcaaagaatcatgcctatcgtgaaggatgcctttcgcattcatgcaaatccatttccttggaaaaaggctatcggatcaggtttcgcttcagggtttcctgtgctggtcggtgcattggcaggtcacacggattacggattaattgcaagtatcggaggctttgtttatttatatgcgggcggtgaatcgtacaaaaagcgcgccttgaagctgctcttggtttctattgggatcgccctctcatttggtttagggacgcttttgtccgggatgctttggatgatggcggctgttttggggctgatcggtgcagcggcgatgtttatttttagcgcgctcggcattcaaggccctgcgccgatgttttttgtccttgcctttttagtcagttccgggctgccggccgatccttcacaagcgctgttcagagcgggactgacgtttctcggcggcattttcgccatgggtatcgctttaatcggctggttatggaacaaacatggaccggagggagcggtgctgcaaaaaacatatcatcagctggctgcatgtctttcagccgtcggaacgccaggttttcataacgcacagcatcagacggtgctcatgcttagaacagcccgccaaacggttcttgggaaagggaacagacggaaaaaatcgcggcatgatgaacgattttttcgcctccttgagaaagctgacgacatatttattgccattattcatttttcagctgaaacgccggacagagagaccgcgcagattgaaaaggcacttcgccaaaccggagatatgcttgcgaatgcacgggttttcaatacgtttcagattaatgaaaatgaatctgagcctaggcggaagctgtttgaagaaatcaatgaggttttgtatatcgcttcaggacgttttgataagcagcttgacggggaaccaagccgcctgccatcctctttttactttttgagaaatgcctttgactggaagtctccagttttgattagagcgttaaagtacggaattgttctgtttgccgccgatatgtttgccctcgcattcggctttgcacgctcctattggattccgctttcggcagcagcggtcatgcttggcactactgttgtttttacgcttcacagggctattcagcgttcggccggaacggtgatcggtgttatactggcaggcgcaatcctgttttttaagccgggcggtgtttatattgcgttttgtattgcagcgctgcaatgtcttcttgagatgctgatcgtccgcaattatgcgctggctgttccctttttaaccgcaaatgcgcttgttatcacagaaagtatgcatggcggggcgggcgccggttattttatgatagcgaggctgactgatgtagctgtcggcagcgtgatcgggctgttgggaacaatgcttttgtggcggcggttttcaaccaagcggctgccagaacttgtgcggaatgtcatccggctggaagggcagtttatggagaaactgttaaccgggcaaattgccgacgaacacaagttaagggtgagtcttgtcaggcttcgggatgcgtatgacaaggcgcttggcgagtttcctcacgcgaatgcggatgcgctctggcctgccatttccggtgctcagcacttagggtactatttgctctcggcgcaagctcaccgccgtccgtctgctccgttttctgatgaagagatcaaccagctgcgggcgttttttgaacaggctgagcaatcctttatcatgaaaaggatgcctgcggatattcaagtgccgcatgtccctcattatcctcggatcagtaaagaattgtccgcgctgtattccggcttgagaacagcttttgaaaagtaagctgtttgggaaagttaaataatctttaattcgagatgttttacttgaaagtaaatttctttgtctctataataaagtctaagagagacagaataatcattatgcatctgtatgataataattgatgtgtgatttttaaaaacgaaagggctggtaaaaatggcaaaagtattatatatcactgctcatccacatgacgaagcaacttcgtacagtatggcaacaggtaaagcatttatcgaatcttacaaagaagcgaatccaaatgatgaagttgtacatatcgatttgtacaaagaaaacattccgcacattgacgcagatgtatttagcggatggggaaagcttcagtcaggtacaggctttgaagagctttctgaaagcgaaaaagcgaaagtaggccgtttgggagagcttagcgatcaatttgcatcagctgataagtacgtatttgttactcctttatggaacttctcattcccgccagtgatgaaagcgtatctcgattctgttgctgttgcaggaaaatcattcaaatacacagaacaaggtcctgtcggcttgttaactgataaaaaagcaattcatatccaagcgcgcggcggctactattcagaaggccctgcggctgagatggaaatggggcaccgctacatcggcatcatgatgaacttcttcggcgtaccatcattcgatggcattttcgtagagggacataatgcggagcctgataaagcacagcaaatcaaagaagacgcgattgcgcgtgcgaaagaagcaggaaaaacattctaatgaaaaagcctccccttatttggggaggcttttgttttagtgctccagcataatggttcgtttctctttactgctttccatcgcggcttcaatgatgcggatgacattaataccttcctcagcagtgactggcagcgcagcaccttctcgtatgctttccgctattttacggtaataagtaaggtaggagccatttactgatggaatcgtttctgtttttttgtcggagccacgaatggttgtaagctttccgtaaaactccggaacatccgcaccccagctgtcatcctctggttttcttcccgctctgagtgcgtcttcctgtccgtcaattccatatttgataaagctagaatcttttccatggatttgataacgaggtccgtttgccggaacgattgatcctccgtatagaatggcttgaagcttgccataatccagggttaaatgaaaatagtcaaccgtttcggcattttcccgctgggccatcacgtttgcagtcacggctttaggcatcccaaacaaatgcagggtttggtctatgatgtgggagccgagatcatacagcgtaccagtggcagtgccttctttttcccgccaccgcgcttgaacttcaggtctgtagcggttataggaaacttgatatgtattgatatcttcaagggatccctcagagatcagctttttaatcgttaaaaaatcgttatcccagcgtcggttatgatatacgcttaataatacgcctttttcatcggcagccctttttaatgtttccccctcttcggccgttgctgtcattggtttttccatcacaacatgttttccggcctgtatgcatgccatagtatgctcgtaatgaaggccgctcggggtggtgacaatgacaagctcaatggcagggtcatttgtgatttcttcaagctcatgtacaacctcagcatctggaaaatcccgtttcacttcttctgtccgtgatgtcatgattttgctgatttgatattcatccagaacatccagcagcggcccgtgaaaaacagaaccggacaatccgtatcctaatattccaaccttgatcgtatccacttttcttctcccctttaaaagcgttatcaacagaagtatataccctcctgatcaaatggtaaaacctaactgattcattttttgcgtcggcatgcttagacaaccgtttggacaatcagtataatgggaattaatatcattaaacagaggtgtacgcatggaaaagcataacgaacataaaacattaaaccataaaagctcgaaagaaaaggatcagattacaaaccggcttaagcggattgagggccaggtcagaggcattcaaaacatggtggaaaacgacagatattgtgtagatattcttgtgcaaatttcagctgttcaggcggcaatgaaaaatgtggcgcttcatttgcttgaggatcatgcccatcattgtgtagcagatgccatcaaaagcggagacggggaacaggccatttctgagcttttggacgtatttaaaaagttcacaaaatcataaagcgttttttattgtaataccctacgggggtatggtaggatgaaaatagaaagaataaacaggaggaattgatatggaacaaaaaacattgcaagttgaaggaatgtcttgtcagcactgcgtcaaagcagtagaaacaagcgtaggagaactggacggcgtcagtgccgttcatgtcaatctggaagcgggtaaagtcgatgtttcgtttgatgctgacaaagtatcagtcaaagatattgcggatgcgatagaagatcagggctatgacgtagccaagtgattcaaggtatcgcgcctttagggaggcgcgatatttctttcatttttatataccccccaggtgtatataaaggagtgagtatgttgagtgaacaaaaggaaatcgcgatgcaggtctctggtatgacctgtgcggcatgtgctgccagaattgaaaaaggcctgaagcggatgcccggtgtcacggatgcaaatgttaatctggcaacggaaacatcaaatgtaatctacgatcctgctgaaacagggactgcagcgattcaggaaaaaatagagaagctgggctatcacgtcgttacagaaaaagctgaattcgatattgagggcatgacctgtgcggcttgcgccaatcggattgaaaaacggcttaacaaaatagaaggcgtcgcaaatgcaccagtaaacttcgctttagaaacagttacggtcgaatacaatccaaaagaagcgtctgtcagcgatttgaaagaagcggtagataagcttggatataagctaaagttgaagggtgaacaggacagtgaggctgctgctaaaaagaaagaagaacggaagcaaacggcgagactgattttttcagctgtcctgtcatttccattgctttgggcgatggtgagccattttacatttacatcattcatttgggtaccggatatatttctcaatccgtggatgcagtttgcgctggcgacaccagtccagtttctgatcggctggccgttttatgtgggtgcgtataaggcgcttagaaataaaagcgccaatatggatgtattggtcgccctcggtacgacggctgcttacgcttatagtctttatctaacttttcaaagcattggctctcacgggcatacagacggcctttattatgaaacaagcgcgattttgctgacgctgattttattaggcaagttgtttgaaacaaaagcaaaaggccgttcctcggatgcgattaaaaagctgatgaagcttcaagcgaaaacagctactgttgtaagagacggacaggagcaaatcatcccgatcgacgaagtgcttgttaatgacattgtttacgtcaaacctggcgaacgaattcctgtcgacggagaagtggttgaaggccgttcagcggttgacgaatcgatgattacaggagaaagtcttcctgttgacaaaaatcctggtgacagcgtgacaggttcaaccgttaacgcaaacggctttctgaaaattaaagctgtcaacgtcggaaaggatactgcgctttctcatatcatcaaaattgttgaggaagcacaagggtcaaaagcgccgatccagcgtctcgctgaccagatttcaggcatttttgtacccattgtattggggattgcggttctcacttttctcatttggtatctttgggcggctcctggcgattttgccgaagcgatcagcaagttcattgcggttcttgtcattgcctgtccttgcgccctcggtcttgccactccgacgagcataatggctggatctggacgcgctgctgaattcgggattttatttaaaggcggcgagcatttagaaaaaacacatcgtctcgatacaattgttcttgataaaaccggaaccgtgacaaacgggaagccgcgtctgacggatgccattccattcggccgttttgaagaaaaagatttgcttcaatttgcagcggcagcggaaacgggatcagagcatccgcttggcgaagcgattattgctggcgtgaaagataaagggcttgagataccgaaacttacccgctttgaagcaaaagtcggcgcaggcattttggctgaagccggaggaaaaagcattctcgtcggcacaagaaaattaatggagagcgaacaggttgagcatggggctcttctcgcccaaatggaagagctagaggccgaagggaaaacagttatgcttgtatccattgatggagaagcagcggggctagtagcagttgcagatacgattaaggatacgtcgcggaaggctgttgcccgtctgaaagagttgggtcttgatgtcatcatgatgacaggagacaatcgcagaaccgcagaagccatcgcgaaggaagcgggaattgcgaatatcattgcggaagttcttcctgaacaaaaggcggcggaaatcgcccgcttgcaaaaagaaggccgccagacagcaatggtaggcgacggaattaacgatgcgccggcgcttgccacagctgacatcggcatggcgattggaactggcacggacattgccatggaaacagcagacattacacttattcgcggcgatctgaacagcattgccgacgcaatccgcatgagcagattgacaatgaaaaacattaaacaaaacttattctgggcgcttggctataacagcctcggcatcccaatcgcagcacttggatttttagcaccgtggatagcaggagcagcaatggcattcagctccgtttccgttgttctgaatgctcttcgtctgcaaaaagtaaaatgaaaaaccggctatatgccggtttttgtttttcattgacactttcttggaaaacaacatataataggtgtaacttatatatgagtatatgctcatatatataaaataaatacaatactcattgatacgctttgaagagggaaccctaaatcggaaggtaaggtgagactagtgaaacaggaatatgttctggacggtttggattgcagcaattgtgcccgaaaaatcgaaaatggagtcaaaggcataaaaggcattaacggatgcgcggtaaattttgcggcaagcaccttaactgtctcagccgatgggaaagaagagcaatgggtcacgaataaagtagagaaaaaagtgaaatcaattgatccgcatgtaacggttcgccaaaagcatataaagaaatcagctgatgatggctatcgtaatcgaatggtcaatatgctgatcagaatggcggcggctgtcattctcggcgcagcggcatatttggttcagtcgggaaccattgaatttttccttttcctcggtgcttatttgattatcggcggtgacattataatccgcgcagtcaaaaacatcatccgcggtcaggtgtttgatgagcatttcttaatggctcttgccacaatcggcgcttttctgattcagcaataccctgagggggtcgccgttatgctgttttatcaaatcggtgagctttttcaaggagccgcggtcagccgttccagaaaatcaattagtgcgttaatggacatacggcctgattacgccaatctcaaaacaaagaacggcatcgaacaggtttcgtcggaggacgttcagacaggagacatcattgtggttaatccgggagaaagcatacccctggacggtaaggtcgtgcaagggtcagcgatggttgatacatctgctttaacaggtgagtccgttccgagaaaagctgcggaaggacaagatgtaatgtcaggctttatcaatcaaaacggcgttctgcatattgaagtcacaaagggctatcaggaatcagcagtatcaaaaatattagacttggttcagaatgcgagcagccgtaaagcccggacagaaaactttatcacgaagtttgccaagtattatacacctgctgtggtgatcattgcggtattgctggcctttgttccgccgcttgttctttctggcgccgcgctttccgattgggtgtaccgcgcgcttatctttttagtgatttcttgtccttgtgcgcttgttgtctctattccgctcggtttcttcggtggaatcggagcggcctcaaaggccggagtgcttgtaaagggaagcaattatttagaagctttgaatcaagtcaaatacgcggtgtttgataaaacgggaacactaacaaaaggcagctttgaagtgacagaaatcaaacccgcggaaggttttacaaaggatagattacttgaagcggcggcatacgctgagcttcattcacagcatccgattgctgaatctgtgcgtaaagcttacgggaaaatgctttcctccgatgagattgagtcatacgaagaaatctccggtcacggcatttttgcaaaggtaaatggaactgagatccttgctgggaataaaaagctcatggaaagagaacaaattgaggatgtcccggatgaaaatgctggaacaatcgtacacgttgctgtagatcaacgctatgccggagcaatcatcatagcggatgagataaaggaagacgcagcacaggcggttgctgatctgaagtcgcttgggatcaaacagacagctatgctgacgggtgattcgaaacaaacgggagaagccgtcggaaaacagcttgggattggtgaggtatatgcagagctgctgccgcaagataaagtcgcgcaggtcgaagcattagaagctaagcttttgcctagtgaaaaactcatttttgtcggtgacggcatcaatgatacgccggtgcttgcacgcgcagatataggggttgcgatgggaggccttggctcagacgccgcggtagaagccgcagacatcgtgctgatgacagatcagccgtcaaaaatagcagaagcgattcggattgcgaaacggacacggcgaatcgtgtggcaaaacatcggctttgctttaggtgtgaaagcgatctttctcattcttggtgcatttggaattgcgaccatgtgggaagcggttttctcagatgtcggcgttacactgcttgctgtggcgaacgccatgcgcgtcatgcgtctcaaaaacaaataaattgtcggagagaattcattttttcggggttttcttatcagcgcttgtcttgttaaaataaagaagtgggtcaattgcgatccgcttcttttttaattttaaaacgatgaggtgtcggagtgaaaaagaaacagcagtcttctgcgaaattcgcggtcatccttacggttgtggttgttgtattgctagcagccattgtcatcattaataacaaaacggaacaaggcaatgatgcggtgtccggacagccgtctatcaaagggcagcctgtgcttggcaaggacgatgcaccggtaactgtagtagaattcggagattacaaatgtccgtcttgcaaggtgtttaacagtgacatctttccaaaaatacaaaaagactttattgataagggcgatgtgaaattttctttcgtgaacgtcatgttccatggaaaaggttcaaggttagcggctcttgcatctgaagaagtatggaaggaagaccctgactctttctgggatttccatgaaaagctgttcgaaaaacagccggatacggaacaggaatgggtaaccccaggcctccttggtgatcttgcaaaaagcaccacaaagataaaacctgagacgctcaaggaaaatcttgataaggaaacattcgcttctcaagtggaaaaggattctgaccttaatcaaaaaatgaacatacaggcaacaccgacgatttacgtcaatgataaagtgatcaaaaattttgcggattatgatgaaatcaaagagacaatagaaaaagagctgaaagggaagtaacaatatgaaaaatagaatcgtatttttatatgcttcctgggttgtggctcttatcgctatgctgggcagcctgtatttcagtgaaatcagaaagtttattccatgtgaactgtgctggtaccagcgtatcctcatgtatccgctcgtcctgattttaggcatcgccacctttcaaggggacacacgagtgaaaaaatatgtgctcccgatggcgattattggggcattcatttcgatcatgcattacttagagcaaaaagtgcccggctttagcggcattaagccatgtgtcagcggcgtgccgtgctcgggccaatatattaactggtttggttttattacgattccattcctggccctgattgcttttatcctgattatcatttttatgtgcctgctgaaaggcgaaaaatctgaataacaaaaaaagcgcccgcgtatgccgggcgcttttttaatttcgcaaactcatgtccatcagcaatagccgtattccctctaaatttatctttttttctcatgaaaatgttattgattttacgctggagcgattataaaatctagaggtcgtcagaaaatttaacaaacataaaagggagtcatcagaatggcttgggagctgcttagtgtgattggcatcattgcgtttgcagtcagcggcgcaattgttgcgatggaagaggaatatgatattttaggagtttatatattagggattgtcacagcttttggaggaggagcgatccgcaatttgctgatcggtgttccggtgtcagcgctatgggagcagggagcgtactttcaaatcgcgcttttatctattacaattgtgtttctgtttccgaagctgctgctgaagcattggaataagtggggcaatttatcagatgcgatcggcctcgctgcctttgctatccaaggcgcactgtatgccgtcaaaatgggccatccgcttagtgccgtgatcgtggctgcggtgctgacgggaagcgggggcgggatcatccgcgaccttcttgccgggcgcaaaccgcttgtgctgaaagcggaaatctatgcggtatgggcggcgctcggcggtttaatcgtcggcttgggctggctggggaactcgttcggcttatacgttctgtttttcgtgctcgttgtttgccgggtttgttcctatatgtttaattggaagctgccaaaccgttcttttcgcttagataattaatagcaaaaaaaccgatttcgaagtgaaatcggtttttttctgcataatataaataacccaaaccttgattggtattgggtgaatgtgctattataaattgtatttgccagtttgcatcatatatttaatatatgtatccaattatattttacagtatttcatctatgtttgtcaactattttctggaggtgccgttcatgaatcagcaggataaggaatggaaggaagagcagtcgagaatagatgaggtgctgaaggagctcgaaaaaaaagagcggtttctggaaacgtctgcgggcgggttgaagcatgatatcatcggattaagaaaaagcttttgggaggatgttaaggttaattttgatgatgcccatgaagcgattgaaacgatggctagcattaagcagcaggcagagctgctgtctgatcgggaacacaatcatcggcgcatggatcagcagctcaaacgaattcatcaattgaaaaaatcgccttatttcggccggattgattttattgaaaacggcgaggagcaggcagagcgaatttatatcggtttagcttcctgtttggatgagaaggaggaacactttctgatctatgactggagggcgccgatatcaagtttgtactacaattattccccaggaaaagcggagtacgaggtgcccggtgaaacgatagaaggggaaatggtgctgaaacgccagtttatgatcaaaaacggcactctcaaggcgatgtttaataccgatatgacgattggcgatgaaatgctgcaagaggtattaagccatcactctgatacccaaatgaaaaacatcgtgtctacgattcagaaagaacaaaatcagattatccgtaatgaaaaaagcaagatcctgatcgtgcagggagcggctggcagcgggaaaacatcggctgcgcttcagcgtgtcgcttatttgttatacaggcaccgcggtgtcattgatgccggacaaatcgttttgttttcacccaacttcttatttaacagctatgtctcctctgttttgccggagttaggagaagagaatatggagcaggcgacgtttcaggaatatatcgagcatcgtcttggccgcaagttcaaatgtgaaagcccctttgatcagctcgaatattgcctgaccgaaacaaagggaggcgattttccaacaaggcttgcaggaatcacatggaaggcgggtttatcctttcagcaattcattaatgaatacgtcacacggctttcctctgaagggatgatttttaaaaatattatattccgcggacaaaagctgatcacaaaggagcaaattcaatcctatttttactcattggatcaaaatcactccattccgaatcggatggagcaaaccgcgaagtggctgctgagtgagcttaacaagcttgagaaaaaggaacggcgaaaggattgggttgttcatgaagctgagctgcttgacaaagaggactacttggacgtgtacaaaaaactgcaggaaaggaaacggttcagcgagagtacgtttaacgattatcaaagagagcagcagctgcttgccgccatcattgtgaaaaaagctttcaaaccgctcaaacaggcagtcaggctccttgcatttcttgatgttacacaactttatttgcaattgttttctggctggggaggaaaatttcaacatgagaagatggatgcgataggtgagctgacccgttcggcatttacggataataaattgctctatgaggacgcggcaccgtttctttatatgcaggatctgattgagggcagaaagaaaaatacgaaaatcaaacatctatttattgacgaagcccaggactattcaccgtttcagatggcttacatgagaagcatttttccggctgccagcatgacagtgctcggtgatatcaatcagtccatctacgcgcataccataaacggggatcagcgtatggatgcgtgctttgaggatgagcctgctgagtatgttcgtttaaagagaacatacagatcaacaaggcagattgtcgagtttaccaaagcgatgcttcaagatggagcggatattgagccgtttaatagaagcggggaaatgccgctcgttgtcaaaactgaaggacatgagagcctttgccaaaagctcgcgcaagaaattggccggctcaagaaaaaagggcacgaaacaatagccgtcatctgcaagactgcgcatcaatgcatacaggcgcacgcccacatgagtgaatatacagatgttcgcctgattcataaagaaaatcaaccatttcaaaagggtgtttgcgtgattccggtgtatttagcgaagggaattgaatttgacgcagtgcttgtctatgatgcatctgaagaacactatcatacagagcacgaccgcaggcttttatatactgcgtgcacccgtgcgatgcacatgctggcggtattttatacaggtgaagccagtccgtttgtaaccgctgtgccgcctcacttatatcagattgctgaatgaagagaagggagtccttctcttttttctatttacatgaagcatagccgttttatcattaggattcttaatagttatcatcatgtaaatatattttacttaagcctagtattccggtaaagttcaattagatgcaattttcgatcagtttataactttgtgaggtggatacgttgcaacttcaggtaatgaacagtccgtttaatcaggagcaggcagagctccttaaccgccttctgccgaccttgaccgaatcccagaaaatctggctgagcggatatttatccgctcaatctgtttccgcccaagaagctgcgggtacgccggcggcagctgtgtcagcggaagcaccggcaccggccgtttcaaaagaagtgaccgttctttatggttcacagacgggaaacgcacaggggcttgcagaaaatgccggcaagcagcttgaacagagcggttttcaagtgaccgtctcatccatgagcgattttaagccgaatcagctgaagaaggtaaccaatcttttaatcgtcgtcagtacgcatggagaaggcgagccgcctgataacgcgctgtcgtttcatgaatttctgcacggaagacgggcgcctaagcttgaagacctgcgcttttccgttttggcgcttggtgacagttcgtacgaatttttctgccagacagggaaagaatttgatcaacgcttagaagaactcggcggaaaacggatttctccgcgcgttgattgcgatcttgactatgatgaaccggcagccgaatggcttgagggtgtattgaaaggattaaatgaagctgggggcggaagcgccgcgcctgcgccggcggctgcgtcacaaaccggtgagtcttcgtattccagaacaaacccgtttcgggctgaagtgttagaaaatttaaatttaaacggcagaggatcaaataaagaaacacgccatgtggagctgtctcttgaaggatctggcctgacttacgagcctggtgacagcctcggcgtctatccggaaaacgatccggaacttgtcgagctgctccttaaggaaatgaattgggacccggaagaaattgtgacgcttaataagcaaggtgatgtccgaccgctgaaagaagcgctgatttctcactatgagattaccgttctcacaaaaccgcttcttgaacaggcagcccagctgacagggaacgatgagcttagagagcttttagccccgggaaatgaggagaatgtaaaagcctatattgaagggcgcgatttgcttgatctcgtccgtgactatggcccatttagtgtatctgcgcaggagtttgtctcgattttgcgaaaaatgcctgcccgcctttattcgattgcaagcagtttatccgcaaatccggatgaagtgcacttaacaatcggcgcagtccgctacgatgcgcacggccgtgaacgaaaaggcgtctgctcgattttgtgcgcggaacgactgcagccgggagacacactgccggtttatgtacagcacaatcaaaactttaagcttccgaaagaccctgaaacaccgattatcatggtgggccctgggacaggcgtcgcacctttccgttcgtttatgcaggagcgtgaggagacgggagcggaaggaaaggcatggatgttctttggcgatcagcactttgtcacggatttcctttaccagacagagtggcagaattggctcaaagacggtgtgctgacaaaaatggatgtggcgttctcacgtgatacggaagaaaaagtatatgtgcagcaccgcatgcttgaacatagcgcagaattgtttgaatggcttcaagaaggagcggctgtttacatttgcggagatgaaaagcacatggcgcatgacgtccataacacattgcttgaaattatcgaaaaagaaggcaatatgagccgcgaagaggcggaggcttatcttgccgatatgcagcagcaaaaacgctatcagcgtgatgtatattgatttgacttgaaaggagtttttcaacatggtgaccaaaattctaaaagcaccggacggctctccaagtgatgttgaacgcattaaaaaagaaagtgattatttgcgcggcacgctgaaagaagtgatgctcgatcgaatcagtgcgggaattccggatgatgataaccgcctgatgaaacaccacggcagttatttgcaggatgaccgcgacctccgaaatgaacgccaaaagcagaagcttgagcccgcatatcagttcatgctgcgcgtgcgtatgccagggggcgtctcgacgcctgaacaatggcttgtcatggatgacctgtcccagaaatacgggaacggcacattaaaattgacgacacgtgaaacattccaaatgcacggaattctgaaatggaacatgaagaaaaccattcagacgatccactcagcacttttggatacgatcgcagcctgcggagacgtaaaccgtaacgtcatgtgtgcatcaaacccttatcaatctgaaatccactcagaggtatacgagtggtctaaaaaattaagtgatgatctgctgccgcggacgagagcatatcatgaaatttggcttgatgaggaaagagttgccggcacgccggaggaagaagtcgagccaatgtacggaccgctctatctgccgcggaagtttaaaatcggtattgccgttccgccgtctaatgatattgacgtcttttcacaagatctcggattcattgcgattgtcgaggatggcaagctgatcggttttaacgtggcaatcggcggcggtatgggaatgacgcatggcgatactgcgacatatccgcaattagccaaggtgatcggtttctgccggcctgagcaaatgtatgacgttgctgaaaaaacgattacgattcagcgtgattacggcaaccgttctgtccgtaaaaatgcgcggttcaaatacacagttgaccgcctcggtttagaaaacgtaaaagaagaattggaaaaccgtctcggctggagcctggaagaagcgaagccgtatcatttcgatcataacggcgaccgctatggctgggtggaaggcatcgaggataaatggcatttcacgctgtttgtcgaaggcggccgtataacggattacgatgattataagctgatgactggcttgcgggaaatcgccaaagttcatacaggtgagttccggctgacagccaatcagaacttaatgattgcgaacgtttcaagcgataaaaaagaagaaatcagtgctttaattgaacagtacggactaactgacggcaagcactattcagcgcttcgccgcagctcgatggcgtgcgtcgctcttccgacctgcggattggcaatggctgaagcagaacgttatttgccgaccctgttagataagattgaagagattattgacgaaaacggccttcgtgatcaggaaatcaccattcgcatgacaggatgcccgaacggctgtgcacgtcatgcactcggtgagatcggatttatcggaaaggcgccgggcaaatataatatgtatcttggcgctgcgtttgacggaagccgtttaagcaaaatgtaccgtgaaaacatcggtgaagcagacattttaagcgagctgcgcatccttctttcccgctatgcgaaagaacgcgaggaaggcgagcatttcggtgactttgtcattcgcgcgggcattattaaagcaacaactgacggtacgaattttcatgattgagaaagaaagacgagagacagggagtagcttcctgtctcttttttctataatttgctcttctgcaaaaaagttcactgtgagcatatcatgagaaaaaataccctaaaaagggtactataaaagaagacaagtgtggagagaactcctgcgaaaccacatagcggatgcaaggccaccctagctcaagggcttttagacaaacagattttttggctcatcatgccgacacacaacagacgaaggaggtcatgcatttggacatatttttagttgtgctcgtattattaacgattattgcgatttctaatatcgtgaaccggtttattccgtttattccggtgccgctgattcaagtggctcttgggattcttgccgcctcatttccacagggacttcattttgaattaaacaccgaattgttttttgttctttttatcgcgcctctgctatttaatgatggaaagaggacaccgcgggcagagctttggaatttaagggctccgattttattgcttgcactcggccttgtatttgcgactgtgattgtaggcggctacacgattcactggatgattcctgctattccgctggcagcggcctttggacttgcggccattctttcaccgactgatgtcgtcgctgtcagcgcattatcaggaagagtgaaaatgccaaaagggattcttcgcctgctggaaggtgaggggctgatgaatgatgcatcaggtctggtggcctttaagtttgcgattgcagcggcagtgactggtgcattttcattagcacaagcggctgtcagctttgtctttatttctctcggaggcttgctgtgcggggttgtcatttcatttttgattattcgttttcgcctatttctgcgccgccttggcatgcaggatgtcacgatgcatatgctgattcaaattctgacgccgtttgtgatttatttggcagctgaagaaatcggcgtttcgggcattttagctgttgtagctggcggtattacccatgcggttgaacaggatcgtctggaatcaacgatgatcaagctgcaaatcgtctcctcaagtacgtggaacattattttatttattttgaacggcctggtcttcgttattctcggcacgcaaatccctgatgttatttctgttatctttaacgacactgccatcagcaacatgaaggtgatcggctatatcctagtcatcacatttacattaatgctccttagattcctgtgggtgctgttcttctggaacggcaaatggttctttaataaagatcagaacatctataaaccgggtcttcgttcgacgctgttaatttcgatttccggtgtgcgtggagcagtaacgcttgcaggttctttttccattccgtatttcctggaggacggtacgccgtttccggaaagaaatctgattctctttttagcagccggcgtcattttatgcacgcttgtcattgccaccgttgtgctgccaattctgactgaaaaagaagaagaggacgaggaacgaaataagaagctgctgacggcgagacgcaagttgatcaaaacagcccttcaaacgattaaagaggacatgaatgagacaaacaaaacggcctctcttgcggtgatagctgaatacaatgagaaaatgaaaaatcttcgttttcagcagtatacatcatctaatcgcattaagaagcacgagcgaaaagtccgtgcgcagggggttaaggctgagcaagaggcgctgatgaaaatgctggagcggggagacatcccggaagaaacagcaaatgtgctgcaagaacgatttaacgagttggaaattttgtatgccaacccgtttaaagtcgggttatcaaaaacaaggctcaagaggctgatgtattggattttcttcggtgaacataaaaagccggagatgtcgattttaaatgaagcgggattgatacgggcaacaagagtgaaaacggcaaaagcagcgatagaatatctggaaaaacataagacggatgagcataaagaagtgtttttatctgtcattacattctataagcagttaattttcaggctggagcacagccatcatgagttaaaatcaagtgcccattttgaaaatcagaagctggaagtgaagctgaaggctgtgcaggcgatcagaaatgaaattcaaacgctcttcgaagagagggaaatttcccgggacatctcccatgagcttcgccaatacattaatgatgtcgaagccgccatgcttgaaggcggcgaataaatgcagaaaaaaagctggcgttagagcgccagctttttttatattaagggcgatgaaatgcgacagtgctgccatcccggtcgaaccagcctctgaaggcccagttgatccagccgccatcgcctttgtttgtaaaggttccatcttcaaatacccaaatgccatacgtaatgccgtcgtaaacggctgagccgtaaaattgcacaccgttcaaatgatcttcatattcctggcttaaattaaagaccatgacgttatatttttggccggacgcgtagaaggaagactccatgaggtttttcacaaagccatccctattctgtgcggatttgatggcatcagcgatctggttggcaattccaagtacatccaggttgacgtttaaacctacatcagcggcagttgttccagcagtagttgtctgcgacatcttcggagcaggattttcttcagcggaagcaaaggacaaaggggcaattgtcaaagcggcaccaagagcaagtgtcattgggatacgaatacgtttcaagttgtttcctcctttgttttcatttggttacactacacgcataccctgctcaatgtatttgtaatctcaatattgttaaaataggaaaaaaatagtgtttggatttgcctgtgctgtgaaaaaagaagcaaaaagagggtcttaagcgtattattggtatcggctgagaggaatgtgagataatatagacgcttacatttcagtgaaagggtggaggttcaagtgccaacaagtttaaaagatactgtaaagttacataacggagttgaaatgccttggttcggtctgggcgtttttaaagtagaaaatggtaatgaagcgactgaatcagtgaaagcggcaattaaaaatggctatcgcagtattgatacagcagcgatctacaaaaatgaagaaggcgttggcatcgggattaaagaatccggtgtggcaagagaagagctcttcatcacatcaaaagtgtggaatgaagatcaaggctatgaaacaacgcttgctgcctttgaaaaaagcctagaaagactgcagcttgattacttagatttatatttgatccattggcctggcaaagataaatataaagatacatggcgcgcgcttgaaaagctgtacaaagacggcaaaattcgcgcgatcggcgtcagcaatttccaagttcatcatttagaagagctgttgaaagatgctgaaatcaaaccgatggtgaaccaagttgaatttcaccctcgcttgacgcaaaaagaattaagagattactgcaaagggcaaggcattcagctggaagcgtggtctccgctcatgcagggacagcttttggataacgaagtactgacacagattgctgaaaaacacaataaatctgtggctcaagtgattttgcgctgggatctgcagcatggagttgtaaccattccaaaatccattaaagaacaccgtatcatcgaaaacgctgatatttttgatttcgaattgtctcaagaagacatggacaaaattgacgcattaaataaagatgagcgtgtcggtccaaatcctgatgagcttctgttttaatcaaaaaactccccgttatggggagtttttttagtgcgtttttttctgttgaatgaaaaacagcatcaaaaaggaaatgacaacaatacagacgacccacgcccaagcaagggtattgttgccggaatccaatgcgacatatatcgccgtcggcagtgtttgcgtaacaccggggatgtttcctgcaaacatgagtgttgcgccaaattctccgagcgcccgcgcaaggctaaggatgcttccggtcagtaacgaaggataggcaagcgggacggagatatggataaacactttccatctgctagcgccgtctaccattgccgcaccttgtatatcgggatcaatgtcagcaaatccggttttggctgattgatacataagcggaaaggctacaacagccgaggcgatcacagcggcccaccaggtgaaaatgacaggctgctggaaaatccactcgatggcttgtccgatgaagctgtgctttccgaaaatgacgatcagaataaaaccgacaacagtaggcggaagaacgagcggaagcataaaacatgtttcgagtgccgtttttccgaaaaatgatgcccgtgacatccatgctccagcaagtgttccgagaataatgacaacaattccggcaactgccgccacctgaaaggaaagcacaacgggtgtgaaaaattctgaagcgcttatgctactcggcagtaaagccatatttctcaaatactttcattgcttcatcagattgcaggtattcgtaaaattccttcgcttccttacggtgttttgtatcttttacgattcctaacggatagacaattgggctgtgtgtatctgcttttgcctcgtcaacaatgttgacctttttcgagactagggcatctgttttataaacaacacctgcgtctacattgccggtttcaacataagaaagaacttggcgaacgtcttttccatacacaattttatccttcactttgtcccataaagacagctttgtcagtgattctttcccataagctcctgccggtacggattccggagtgccaagagcgattttttctgattcagccagattgctgaagcttgtcacaggtgaatctccgtttttcggtacgaccagcacaatttcattaccgactaattcagtgctgtctttttttgcgatatctccatcatccaccagctttttaaatttatcctcagcagctgagaagaacagatctgctcctgctccttgagaaatctgtttttgcaaggcgccggatgagccatagttatcttggatggttatatgttgatgatctttttcataatttttttggatttcctcaagtgcatcctgcgcgctggcggcagctgagatggttaacgttacttttttctcgctgtccgttgaagactggtttgaagaacagcctgctacaagcagaaaagcagttaaggctgcgatgaaaatagaatacttcttaaacatgattgcaccccttatcattagatataactaattataactgattatgtttggtttatgtgggtttttttacattcggcgaaaaggtataataaaataggagagtgatgatgatgaatgaaacctcttcctatacgatagaagaagttgcaggtctgctgaaggtatcaaagctgaccgtttatgacttgattaaaaaaggcgtgctgcctgcttaccgtgtcggaaggcagatgcgtgtggatgaagaagatttaaagcaatataaaacgaatatgagaatgtctcagcccatcgctgcaaaagaagcgccgaaacaggtgcaggaggctgagccggacggcagaccaaatgtcatgatcagcggacaggacatttcgatggatatcctcagcaagcatttggagaatgccattcaggagacgccgctccgtaaatacaaaggaagcttaaacagcctgattgatatgtatcaaggcaagtgtgacattgtcagcctccatttgtacgatgcagaaacgggccagtataacgcgccttatgtaaaacggattttgacaggtgaaccgttttgtctcatcaatgtcgttctccgcaaagcaggactgtatgtgcaaaaagggaatccgaaaaacattcaaggctggaaagacttgaaaagagccgatatccggatcatcaacagggaaaagggttctggcgcaagggtgctccttgatgaacagcttggcttgcttggtgtgaatccggctgatgtagtgggatatggcgatatcgtgactgatcattacgctgccgcttcacaagtttcaagcggacaggctgacgcgggaatcggggcacagcacgcggcacatatgggcagtgttgattttatcccgctcatcgacgaacaatatgatatcgttgttttgaaaaaaaatgagcagttgctcaaagccgtgaaggagattttgaattctgaggactacaaggcgaatctgtctcatttaaacggctatgaaacgaagctgactggcaaggtgatattggaaacgtaaaaaatccctcttgatagagggattttttcattcggaaaacctgagcaggtcaccatttaaaattttatcagagagagacagttcttcgtttgctttctccttgtaagggaggcacgcatcctgatcttccagcacttcacctgttttttggctatagcacgtgttctttgtgtatacataatcgttcgtaataaagctgccgtttcgcagaacggcgaatggggtgcggtcgcccgacagcaaatcattgccgaattggatatcgccttttgtctcaacgccgagcaaatgcatcagcgtcggcctgacgtcgacctgtcccccggcatcagggatggtttccggctgttgatcggtgattcccgggatatgtatgataaacggcacccgctggagctgaacgttgtcatacggtgtgatttcgtctttccctaaaaactcagccattgcctcgttatgggcttcagaaatgccgtaatgatctcccataaatacgatcatcgaattttcgtataagccttcgtccttcagttttttgataaaatgcttcaatgcttcatcctcatagcgaaccgtggtcacatagcggtttaacagatcactgcttgaatcgaattcatctatcagctgatccttttcatcaatctcaaacggaaaatgattcgttaacgtgataaaactgctgtagaacggctgcggtaggcttttcagctttttggcggactgctctaaaaattctttgtcttttaagccccagcttgtcgatgtcccgggagtgacatgaaaatcatcaacatcaaaaaagcggtcaatgccaaatgtatcgtacatgacatctctgttccaaaatgttttatggttagcgtgaaagacggctgaataataatcgtgctgcttcagcgatttatacatcgtatgaaattgatggtcgcttttcgtgaaaaagacggcgccgctaagggagggatacagtgagttagcgacgataaattctgaatctgatgttttgccttgttctgtttgctgatagaaatgatcaaaggaatagcttttttttatgagatcattcataaatggggtaatttcttttccatttactttttcattcagaacaaagctttgggtcgactcaagtgttacaaagatgacattgcgcccctttgcaagaccgaatttgctttgatcaggcttgctgtaatcagcctctgtgtagtttttaatggcagttatactgtcttcatcggcaaaagctttcgcgctgatattaacagtctgagaaattgtatcgtaaatatggaactgaaacaggccgatgcttttgactagcatttcccggtcaaaagaatgtgccaaaagcttcggctgctgtacttctgcaagtgccagtgtgcataaaagcattccgcaggaagctgcatagtaccgtttgatcgtgtggggagcggcttttgtctgtgggtgtttggtttttctggcgaacaacagcagaaaaaccaaatccacaaacagggcgataaacagaggatggaacagttcttttacactgctgcccatatcgctcatgttgctggcctgaaataaaaccgggatggtaataaaatcgatataaaagccgtaaaaaatcgtattagagatcaagataacagtcagaaccaaattggcaatcagcaaaaaggcccgctgcttgttttcttttagaaacaggccgatcccgaataaaggaagaataaagctgagcgggttgaccagcagcattagctcctccaacagagtatcgatttgcaaatcaaagccgagtttatatatcacatacgttttgatccacataaataagatcgaaaaacataaaaaccgctgattgtgaaaaaaggttcctttcatcaatatgactcctcacgttttcttgatcatctgcatgaaatgcttcttaagtaaaacctactaaaaacagccggttcagacaagtctcagcactcatgtttaaaacatgcggccatgaaacagcatataaaagtagtaacatgaagcaagggtcaggccggctagcacgagctgctcagaaaaactgcctgtcttcatatataatggaagccgaacgcggatcgtggaagggaataataatttgattccgttcaccgtccaagcgtcaagaatcaagtggctcgccattccgatcatcaggccggctgatatgtttttatctggaatgtatgtagaagtgataaaaaacatgatgagcataaacagcaggctgtgtgtaaaggtgcgatggccaaaaacggagctgaccactttcgataaaataggaaattttctcccgattttgctttgtgtgtggcagatatcgggtattaatgctccaaccgcgcctgacgcagccataagcactggatcaaatccataataataagccgctgccgtacaagaagcgatgcctcccatgatgtgtgtttttcctgtcatttgccgcttctccttttatcttttgcaaaaaatctctgaattacaaatatatcaagagaatgtatgtttgatcaacaggactttggacgataaaaaatatcccgcataatttttcaggaaaaaggcatcttaaacatgtacctattttttaaaagaggtgatacgaatgggtttctttaataaagataaaggaaaacgttccgaaaaagaaaaaaacgtaatccaaggagctcttgaagatgctggttcagctctaaaagatgatccgcttcaagaagctgtgcaaaaaaagaaaaataatcgataaccacatgcggatagggcttggctctatccgtattttccatctgttccctttgacagatcatcctttctttgataaccttctgggagtaactgaataattaaatcctcactctttctcagtgaggtagaggttgcgcggatgatgagtcacacatgctaggctgacaggggctgttaaacatgtgtaaaaggcatcagcgccgaagtgtggagaaagccgatccttctctatgctgggactgtatctgaataagtgcaggactgccgcgtgctttttcgcggagggctatccggagatcaagggtgtgtgtttctttaagcatggacttttgttcaggctttttttgcgtttatatgatctcggggtctggtccgtacaaagaatcatggaggtactggaatggaacagacaaaaaaatggggtttttggttattaacggcgtttgtcgttggaaatatggttggatcaggaattttctccttgccgagctcgcttgcttcaattgcgagtccgtttggagctacgtccgcctggcttttgacaggtgccggcgtgctgatgattgcacttgtgttcggacacttgtccattcgcaagcctgaactgacagcgggaccgcaaagttatgcaagagcgctgttttctgacccgaaaaaaggcaacgctgccggtttcacaatggtgtggggctactgggtggcgagctggatcagtaacgtggcgatcatcacaagtctcgccggttacttgacttcgttcttcccgatcttggttgataaacgtgagatgttttcgatcggcgggcaagaggtgacactcggccaattactgacgtttgccgtatgtacgatcttgttatggggaacgcacgcgattcttgttgccagcattaacggcgcaagtaaattaaactttgtcacaacgctttctaaagtattaggttttgtcttctttatcgttgccggtttgtttgtgtttcaaacgtcattattcggtcatttttatttcccggttcaaggagaaaacggcacaagcattggaattggtggccaggttcataacgctgcgatttctacactgtgggcgtttgtcggaattgaatccgcggtgatcctgtccggccgtgcgcgctctcagcgtgatgtgaaacgtgcgacaattaccggcttgctgattgccttgagcatatatattattgtgactttaattacgatgggtgttctgccgcatgataagcttgtcggctctgaaaaaccatttgttgatgtactctatgcgattgttggaaacgcgggaagcgtgattatggcgcttttggctatcctttgtttattcggaacgatgctcggctggattttgcttggctctgaggtgccataccaagccgctaaagcaggagatttcccggcattttttgcaaaaacgaataaaaagggaagtccggtcattgcactcattattacaaacgtcatgtcacaggtcttcattttctcggttatttcccggacaataagtgacgcatttacatttttaacgacagcggctacactcgcatatttaattccgtatctggtatctgcaatctacagcttgaaggtagtcatcaaaggtgaaacgtatgaccagctgaaaggctcccgtgtaagagacggattgatcgcgatactggcgtgtgcatactccgtgtttgttatcgtaacaggcacagcagatttaacgacatttatactcggcatcggtttattctttgtcggcttaatcgtttatccatttgtgagtaacaagttccagaaagaaaaacaagcataatgaaaagacacctgatttgctcaggtgtcttttttataaaatcacaatttctcctgttaggaatccgttcgttaaatatgcaaaaaacgtttttcagtctctccagcataaaaaaactgatcgtgatgaggatgcagcttaatatgaatggctcaaagaaaatatccgatatgattcaaattgagccgttccttataaataaacaaaagagccgcgggcaggcggctcttttgtttatttagtcaagctttccgtaataaactccagttgtccttctaatgaaatcgggtctgtgaaatagaatccgatcggatccatcttgtatacatggccatttttaacggcattcaggttcttccaaatggagctttcaaaaacgccgccatcatcaccgcctgattgccatgggcccgcgaaaatgtaatctccggcgaagtcagggagcttctctaatgaaatacttgtataacctggcccctggtcaatggctttttcttttgtcagctttgtagcctgcaggccgaggtctttgtaaatgatgcttccgcctcttccaaagtctttaccaaatacgtaaatgtcttttccgttcgtttgcataatggaaatggttttgtcaccgaccgcttttttgatttttgttttagcggccgcaacttttttatcccacttggccagccatttttcagctttatcttcagttcccgtcatttttgcaaattctttcagctgttcgatgttgtcgagcttatcgtattttactgcgacagtcggcgcaattttttcaagctttttaatatcagcgccctgtgttgtccagacgataatcaggtcagggttcaaatcaatgaccttttcaaccgaagtgccgtctccgatgttttcgacgccgttggtttttcctttgtagtaagggtttttaaatacattctcaggcgcacctacaacgttgatgccgagtgttttgaagtagccgtaatagccgtctgccatgacaaccacccgtttaggatgcttcgggatttttacatttccgttttcagccttgtatgtaaaggtttctgcgccttttgaatcagaggcagaacctttgctttctgagttattcccgcaggctgccagcgctgcaatcaataacagggcaaaaaacgcggctccgagtttcttgtatatatgggtcatatctcataccttctttctaaaagatagatgaaaaagagaatcattatcatctgtgattataccactgcaagtgccggttgacacgatatttttgcaaatgcattttcatttttgttcaaaacactctattaaatcagctgaaaaaagtgatatactgaaacagcaattgataatcattatcagtaacagaaaggaagtacggcagttgagtcaacataaaaatatacggactgcatcagaagaaatccaatggacgtcaaggacatatggcgcggtcatcgtccttatcgcaggtctatgcctgctttgccttggcgcatttttatccatatccctaggtgcagcggatattcatttgcgcactgtatgggaggccatttttcattatcagccgacaaagacatctcaccaaattatacatgatcttcggcttccgagaacggcggctgccgcgcttgtaggcgcattgttggcagtgtcgggagcaatcatgcaggggatgacgagaaaccctttggcagagccttcgattatgggtgtgacatcaggctctgcgtttgcggtttcgattgcgtttgccttttttcccggactttctgcaatggggcttgtgctatggtcctttgcgggagcggggctgggggcatcgacggtaatgggcataggcatgttttcaaggggcggacttacgcctgtaaagcttgctctggcgggtacggcagttacttatttctttaccggcatttcaactgccattgcaatccgctttgatgtcgctcaggatatcagcttttggtacgcaggcggggtagcgggtgtgaaatggtcgggggtccagcttttgcttattgcaggggctgtcggtttaacgctcgcgtttttcatcgcccggtctgttacagtgttaagtctcggtgacgatctggcaaaagggcttggacaatatacatcagcggtgaaactggttggcatgcttattgtagtaattctgaccggagctgcggtttccattgccggcaccattgcatttatcgggctgatcattccgcatattacccgttttttggtcggtgtggattatcggtggatcattccttgctcggcggtgctcggtgctgttttgcttgtttttgctgacatagcggccagactcgtaaatgcgccctttgaaacgcctgtcggcgcgctgacttctcttatcggcgttccctttttcttttatttggcacgtcgtgaaaggagagggctgtaatgaaaacaaaaacaaacaaaccgctcattgtaatggctgtgacctttttgcttatcgtggtggtcttttttatcagtctcaatttgggcgttatcaaaattgcaccgcttaaaacgcttcaggtctttttcggccaaggaacggcgcgtgatgaacttgtcttatttgagttcaggctgccccggatcatcctttctttgcttgttggagcagggatctccgtagctggagccattttgcaaagcgtgtctcaaaatgaacttgccgagcctggtattctcggaattaacgccggcggttcacttgctgtagtgctttttatatacttttttcaagggtcagcttcagatcttagctttttcggaacatttatgctgccgttcagtgctttggcaggagcaatcctcgctgcgtttctcatttatattctggcatggaaaaaaggcgtgacaccgattcggctgattttagtcggcataggggtgaatgccggattcaacgccctgttgctgatttttcagctcaagatggaccctcatgattttatgcaagccgcggtttggatatccggctcaatatggggggcgaactggaatatgatctgggcgattctcccttggattgtgatcttgcttctgtttactttatataaggcacgctatttgaacattatgcagctcggagaccaattggcgaccgggctgggcaccgctgttgaaaaggaaagacggattcttcttctggcagcggtcactcttgccgcttcatgcgtggcagctgcggggggcattgcgtttctcggattgatcgcgccgcatgtggctagaaggctgaccggtccacgtcaccagacgctgataccggtctccgccttcatcggctcattcctgtttttgcttgctgatacgctggcgagaaatgtattggcaccatcagaaattccggtcggacttgtcatttccgtgctaggtgcgccttactttatttatttattgatgaaagcgaattagaggagggggccgaatatgaattcattatcaacggaacagcttggaatcggttatggcgacagggtgattgtagaggatttaaatatatcgattcctaaagggaaaattaccaccttaattggcccgaacggctgcgggaaatcaacgattttaaaaacaatgtccagaattatgcgttcacatgcaggtgccgtctatttaaacggcaaagcgattcataaaatgtctacaaaggacattgcaaaagatatggcgattcttccacagacacctgaagcgccgagcggcctaacagtgcacgaattggtgtcgtacggcaggtttccgcatcaatcaggattcggcagattaaatgacgaagaccgccggattatcaaatgggcgcttgaagaaacaggcatggctgaatatgctgaacggccgattgaggcattgtcaggcggacagcgtcaacgtgtgtggattgccatggcgcttgcgcaagggacggaactgcttctgctggatgaacctacaacgtatcttgatcttgcacatcagcttgaaattctgcagctgcttgacagactcaacaaagagcaagggcggacgattttaatggtcattcatgatcttaaccatgcagctcgtttttctcattatatgatcgcgctcaaaaaaggcacggtcatcaaggaaggaactgctctggaggtcatgacaccagacattttgaagcaggtatttcagattgatgccgaaatcgtgactgatccccgtacaaataaacctgtatgcttgacatatgacttgattaaaaatgaaaaagagctagttactgtatgaaaaaatcccggtttgaagccgggattttttttattcggctttgaaaatacaatttttctatttgattccgtcatttcaataaaaggattgcaagtctttttgaattaatagataatattggttagaatgtttcgaaaatattacatagtttacagaaagaggagatcgttgtgtccaagaagaaaaaatggcttattggcggtgcgatatgtgccggtgtgcttgtattggctgggatcggcgctggcggtttttacttttttactcacatgaaccaagttgccgtatcatcggagccctatgctgaatcggtcgcggtatacatgggaggagattcagaatcaggccaaacgttttctggaaaggttgaacctgagaaacagcagaaagtatacatagattcagaaaaaggcagcattaaaaaaacatacgtcaaagaaggcgatcaggttaaaaagggcgataagctttttgagtatgagggcgaggatcattctgatgaagtggagcaagccaatttgcaaattgaaatgacaaatctgcaaatcaaccgtttgcaaaaatcaataacggaaacggaaaaaaagctgaaagttgcaggaaaagaagagaaaaaccagcttcaagatgaacttgatcaaaccaatttcgatttgaaaacaagccagcttgaactgaagcagcatcaaaaagaactggctggcctgacgaaaaacaaaggttccaatgtcattacaagcaagcatgacggaatcgttcaaagcgtcaatcaggatatcgctgacggtgcaacaggcgaccaggcagcaggcccgtatatccagattgtttcgacaggcaaatatctggtcaaaagccaaatcaatgagctgttaatggacacgatcaaaaaaggcagcaaagtcagggtcacgctgaaaacaggcggtgagggcgagtggaaaggaaaggtcacctcgatcggcaagcttccagcgggagcaggcgagggtgaagaatcagaaagctttgctgatgaagaaatgaatccccagtcctctaactatcctttcaccattttattagacagccataaaggtcttgaagtcggctatcatgtcaacatcgaagtgatgagtgataatgctgatgcggacacgatcaagctgccgtccgacatggtcattcaggatgacggcgaaccgtacgtatggaaagctgatgagaatcacaaagcggttaagcagcctgttgaaatcggagagactgatgaaaatgacatggtggaaattaagagcggcctgacgccggaagattatgtgatctatcctgatcccgcggtcaaggaaggaaagcaggttacagtcaatgctgacactgaataatatttcgaagtcgtacaagctgggaaaagaagaagttccaatcttgaaacatatcaatctgaccgttcaggcgggggagtttttagctattatggggccttccggttctggaaagtcaacgttaatgaatattatcggctgtttggacaggccaacctcaggaacctatacgcttgaccagatcgatatattgaaagggaaagacggggctttagccgaaattcgcaatgaatcaatcgggtttgtgtttcaaacttttcatttgctgccgcgtctcaccgcgctgcaaaatgtcgagctgccgatgatctacaataaagtgaagaaaaaagagagaaggcaacgggcatatgaagcgctggaaaaagtcggattaaaagacagggtctcctacaaaccgcctaagctgtccggcggccaaaagcagcgggtggcgatagcgagggcccttgtcaatcagccgaggtttattttagctgatgaaccgaccggggcgcttgataccaaatcaagtgaacaaattttggcactgttttctgaactgcatcgggaaggcaagaccattattatgataacccacgacccggacgtcgccaaaaaagctgacagaaccgtttttatcagagacggagagttggtattagatgagagaggggatatcagccatgcttgaacatattcgaatctcctttcaatccattttctctcataaattaagatcgattctgacaatgcttggcgtcattatcggcatagcggcaatcatcgcgattgtttcaatgctgaagggccaaagtgagcagttaaagcaaagtatgatcggcatgggaaacaacgccatcaatgttgtctaccagccgtctggcggagaagaggagagcggcggccctcaggtgtcgtatgcgtccgcgccgcctgtagcggaagaaacagtaaaggcgatcaaatcagatccgatggtcaaaggattatccttatattacttgtcagaaggcgcgagcgtttttcatttaactaacgtttcgtatccccaagtgtatggagtggacgatgattacttcgacatgtttccaatccgaataaccgaagggagaaagctgacggaaaacgatttaaacagcacacaccaagtagtgatgatcaatgaagctgtcagagatgaactgtttccagacggagaagctctgcataaaagcattgagatgaatggtgtgccgtttaaggtcgtgggtgtttttaaagaaaaaaatcaacaggaaagcatgtttgaaggcgactatgcgaacccggttttgtacgtgccgaaaaaagtgtggccgcttattgaaggatttgacgcgccaacgcagattgccgtgcaggctgattcttctgagcatatccaagaagcgggtgtaatggctgcagatcttttaaatcagggactgtcagaagctgagctggaaaaagcagagtacagtgtaatggatcttcaggagatcgcgcaggaagtggagtcctttaatcagtcatttgcattgctgcttggcggtatcgccagtatttcacttttggtgggcggtatcggcgtcatgaacattatgctcgtttccgtaacggagcgcacgagggaaatcggaattaagaaagcgctcggtgctaagcggcgtgtgattttatttcaatttttaaccgaggctgtcgtgctgacaagcattggcggaatactcggtgtgctggcgggcttcggcatcgccaagctgctgacggtcatttttccgatgccttttatcgtctccattccagctgttgtcggagcactcatcttttcaatggcagtcggcattatcttcggcttgcttccgtctatcaaggcttcgaagcttcagcctgtagacgcgcttcgctatgaataaaaagaacgcatccaattggaatgcgttctttttttagctgggaagagccgagttgcatttgtctaaaatcaaaaaaacggctgcgacaatcatttcttctgtggtggacagccagatgtcgctgatcaattggtctgttgtatgagcagtcatccacaaaaacagcagctgtacgatgccagcaaggagaatgaatagacgttttcctgtcttgaaaaatgtaaagctatgtatcatcagccgttcaaatggttcaaagcataatccgagaacaaggaataccacggcaaaaagcaggacatgagctgctgagcggtagctcgttcccgctaaagaaaacaatatatagatgacagcaaaataggtcaacaccactgctgctgcggccagcaagtactttatggagagccgcaataagcgttttgaagggttttgatgtttcactggttcagctccttatgaaggcttgcagagaacgagtgctctctgcaagccgcaagtcttttatttactgcatttctttttcactactgggtgcttttcttttgaaagcacatcagtaaagtctttgcccaagtcaaggtgcgcttgaacaaatgtttcaggaagcatggcaagccattggtttaaagatacatcagcataatggtcgtctttgaagatttctaaaaagacaagcggttcatccccgatgttttcaacgtaatgacccattgcaaatggtacatatccgacatcaccggcttggtaattaaacgttctggcatggccgtcagatgcaaaaacggtcattctagctttaccggagatgtagtattgccattcgtgggtattcgggtgccagtgcagttctctcatggcgccgggttctactgttacgagcgctgatgcgatggttttagacactttgaagtttgtcgaatctgcaatgtatacttttcctccctcagattcgatcggctcttgttcaagaaggcggtaagtaaatggataaggcacttcgccattcggcccttccacaatatcatcttttaaactgccaggaagttggttttcaaatatatatttttctttgccaggcaaattggaaatctcttcttttgtcacgccgaagttcgcagcaatgacttcttttggagtgtgggccagccaatctgtcagctggaacgtgctgttttcagagaatgatccatcgtcaaacacgagcaggaactcagctccctcctccagcgcttggatggagtgcggcaggcctgacgggaagtaccaaaggtctccttcacctacatcgtcaataaagctgcgccctttttcatctacaattgtgactcttgcacttccgtaaatcatataagcccattcagcttctttatgccagtgaagctcgcgaatcgcgcctggcttcagccgcatatttacggatgcaaggttttctgaaatcggcaattcacgtactgtcacttcccgggcatatccgcctttttctaatcggttatgagtatcagagaatgaaaacttcatattgctgacggtgccatgatcggtttcaggcggaacgagcatatcagggttttgccggtctctttcaatattgcgcgggatttttaccgttgctcctttgtctcctctaattggctgcggaatgtcattttgttttttcatgaaatgtttcctccttacatttaaatgtgatagcagaaagagaaggtgaaaggcctttcgttttcccttctgttttgttaagtgaaaaaaaccagtgaaaagtcaacttcgattgaaaaattatttttttgcatgatctttcagttctgtcattagttctattagttgatcaaacttcttttcgaatcgggtcagcagatacattgcaatcagcgcgggaaaccccaaattgccgatctgttttacgacttcctctataaaaacctgatccataggaaaatacctcccttctttttctgcagtcatgtatgtaagtgaggaaaaccgataaaacgtaaactgctgcaaagtattttggaagacactaggcggaaagtagtagtttacttttttttgctttccttcatttaatttagtagggaggcggtttgatggactatcaaagtcttttacggtcaaaatgtaaggagataatgaagcatcccatcgtgaagcattttttgagcaatcctcagcattaccgtttgttcaaaaacgtaatggaaagccctaacgaaaaagatgcaagatcattggacgagctatttaagcaattttataaagaaatccgcatcgtcaagtatatgaattcaatgattcgcatcttttctattgattttgataagcgggttcgcaaaaaccaaaaacggtatccactgacggttgatcatccggaggcgggagatcggctttcttccgaaacaggtagcgatgcatttgaagaatttttagacaggcaggatgatttgagccagcatgtacaggattaccagctctaccaagcgatccagaagctgactgacaaacaaaaaagtgtgctgacgaaagtctatcttcacggtgccacgatgcaggagattgcagattcattaggggagtcccgacaaaacatctccaacattcataaaaaggggctggagaatatcagaaagcagttagcggcgcaaaaaaagggggaaaagtaagctgtggacggccagtttgaacaaaaaaagaaacaaaaagacgagacttatgacattgagcacctgattgcatgcttttcaccgatgatcagaaaaaaactcagcaatacgtcctatcaagaaagagaagatttagagcaagagctgaagatcaaaatgtttgaaaaggctgatatgcttttatgtcaggatgtaccggggttttgggagtttattttgtacatggtagatgagaactcataatattttcatatgaaaaaacatcaaaagggagcgcttgtttgctccttttttgctgttttgatttgccaaggctccaatgtattcaaaaatgtaccataaataaacgatataatgataagatgaaaaaaacagtgacagaaaggaacataaaagtggaaaatgcgtcaattttaatcgtagacgatgagaaagcgattgtggacatgatcaaacgcgttctcgaaaaagaaggttatcgaaatatactggatgcggcaagcgcagaagaagcgattcccgttgtgaaggccaataaggttgacttgattgtgctggatgtcatgatgggcggaatgtccggttttgaagcctgcacattgatcagagagtattcagacgctccgatttttttcctgacggcaagatcatccgacgcggacaaattatcgggctttgcggttggagctgatgactatatcacaaaaccatttaatccgctggaattagcggcgcggatcagagcgcatctcaagcgtacatatcaatcgaaagaaacgagttcaaatcaaacctacacatatgattactttactttttctccgcaaaatgccgagttgatcgtaggcggggaagccgttgcctgttcagcccagcttctgcagcttttgcagtatttttgtgaacaccctaacgtggtgctttccaaagatcaaatatatgaaaaagtatggggctatccttcctacggtgacaacaacaccgtcatggttcatattcgcaagcttagggagaagattgagcgcgatccgagcaatccggagtatattgtaaccgttcgaggtctcggctatcgttttatcccaaatcctgaaggcaagcggtcatgaggttaagatggaagtttttgtttcactttttcggccagatgctgattgtgatcctgctgcttacggttatgcttgttgcatcgtttttctatttagacgcccgttttagcgatgcggaatccaattcagggctgacgaaagcaacgaccgacacacttgaggcatatctcgatgtaaacgaagacgggacatgggaagtggataatttcctgaagaaatctgttgataaacagcacggctggatgcaaatcattgattcggaaggaaacactgattattcctacggcgtgccaaaagacgtgccgggcacctataccaagaaagagcttttgtctatttataaaaccaaaaagcttcataactataaactgaattattgggccatcaatattgaagataagtcgtatcttctattgtccggctggaaatcaaaaagtgaacagctcctgacttccgttgaaaagcgtgaacaaaagatagactcactagcgcactataagtctagtaccatcgactatattaaacggaaaaaaggcgccatttacctgttagacagcaatggaaagattctcgacagcatcaacagcacaaaaagcgagagaaaaacgatgaaccagctggagctgcttaaatacagctctaagccttggaactataagcgggaaatttccgttaagatcctcaataaagacagatggatggtcgctacggtgccgaacccagtctatgtaaccgatcaggagtttaacaaatcattcctgaaggttgtattaaaagcgatgtttctcgtgatggccgttttgttcatgtatatcatttggatgaccgtttggtatatgttccgattcgggctgccgatttttcacacgattagatggctggtcaatctgtcaaaagggaagcttgaggagcccagaaaccgggaaggccgtcctgtcagcaaaaataaaaagggaaaaatcaaacagccgtaccgcttcttcggtgagatatttgaatcaatggatcagctgactgaaacgctgagaagggataaaagaaacagagaaaaaatccaggcgacaagggaagaatggattgccggtttgtcacatgacttaaaaacaccgctcagcagcatttacggctacagcatgatgctcgagtcgaagcagtatgactggtcgccggaagaagtgaaagaaatggggcaggttgtcagagaaaaatctgaatacatgtctaagctgattgaagacttaaatttaacgtatcgcctgaaaaatgatgctcttcctattgagagaaagctcactagccttatcccgttttttaaaaatgtcattgaggattttaagaaaaatccgttttctgaaggctatgatatctcgtttgtatccaaagaagagcatattgaatttgcccttgatgaagcgtggttcaggcgcatattagaaaacctccttgggaatgccgtgaagcacaacggcaaaggaacagagattcaagtcattctggagcaaacaaaaaatcatatttctttaaaagtgaaggacaatgggaaaggaatggatgaagaaacgatcacccatttgtttaaccgctactacagagggacgaacacaaaagattcaactgccggaacgggtctcgggctcgcgattgccaaggagcttgtccatctgcataacggaacgatccatgtgaacagcagaacgaacattggaacggtcattaccatcctttttaaaaaacaataaacatcaagtggtttggacacctctttgccgggaataacaatatatagactgaagctaaagaggtgtaacacatggatgcagtattggaagcagacactcgggcagtgattggtgaaggcccgttatgggatgaagagaacggccgcttatattgggttgatatcctggggagcgagctccacatctttgaccctgaagaaaaaatcaaccgatcaatcaaattcaaatcctttgtgacggcgcttgcgaaatattcaaaggatgaactgattatgacgatgaaggacgggttttacctgtatcatcttcgggatgacagcttggaaaaaattaaacagccgaaggacatgcatgagagcctgagatttaatgatgctaaatgtgacccgtacggaaggctttgggcggggacgacgagcatggaaggcgagcaaaaacaggcgtcgctgtaccgtttgaatctagacggcagtcttgtcaaaatcaaggatcaagtctccacctcaaacggtttggattgggaccgcgagcggaatttgatgtattacatcgacacgccgacccaggagattgtacgttacagctatgatcctcaaagcggagatgtttcgaatccagaacctgtctatcgttttgatcagtcagacggattgccggacggcatgacaattgaccaaaatggcatgctgtgggtggcgctgtttggcggcagccgcgttgttcacattgacccgtttcagaaaaaagaaatcaattcaatcagcgtgccggctaaatatgtcacgtgctgcgcgttcggcggcagagacttaaaaaccctttacattacaacggcaacagaacaaatgacagaaaaagagagatacgagcagcctcacgctggagggttgttttcagcacaactggaaacaggcggatatcagccggtaccatttgctggagacgtataaaaaaaacgcatccgaaacacggatgcgtttttttatactacagagaacggataatgccgccttccacacgctgtgccgtgccgttaatggcggatgcggcgtcagacgcgaggaatacgattgtgttggcgacttcttctgctgtcgcgtatcgctgaataagtgaggttggctcattgaccttgaaatagtctttgataaatgtatctgtatcctgtccggctgcttgtgcggcgccttccatataggaggccacgccctctgtccaagtaggtcccgggagcactgagttgaccgtcacatttgtgccttttgtcatttcagccattcctcttgaaaggctgatcagtgccgtttttgtcattgagtatggaatcatcgttggcagcggtttgacgcctgcttcacttgcaatatttaaaatgcggccgctgtttttggcaagcatttttggaaggaagtgacggcttgtccgaacggcgctcatcacgttcacttcgaaatattgattccactcttcatctgtcacatcggcgaagtcttttacctcgaagaaaccaaggttgttgacaaggatatcgatatcaccgatttcatttactttttcgataaaagccgctgcttcatctgtttttgacaaatcggcagcagcaccgtgcactgttccatagccagaaagctcttcaatggtgcgatcgacagtctcctgtttgcgtccgttgacaatgactgccgcaccctcttgcagaaagctttttgcggcggctttcccgataccggacgtcgagccggtgattaagacgagtttttcttttagctgtaaatccataagaatcattccttttgatagatgatggtattaagtatacaagatcaaatttagtgtttacgaggattttgcttccatacacaatatggggaaaagtcattcaggacacatatacaagcctgtcagtcatatagtataattactccgaaaaacggatacgaatgtcaaataggtgccggtccgtgaacaacagccggcttaaaagggaaaccggtaaaagccggtgcggtcccgccactgtaattggccaagcgccaagagccaggatacctgcctgtttgatcagcacgaattctgcgaggacagatgatgtgtaaacaataggcttttttgtgttgtttacagcatctttaccgtcgtagagatgcttttttagttcgtttaggaggaaaagattatgaaaaaacgagccgggatatgggctgcgcttctgttggctgctgttatgctggcaggctgcggcaatcctgcggatcagaaggattcaaaggcaaaacaaaaaacagaagtgttccctgtcaccattgatgatgcgtcaaaccaagatgtaaccatcaaaaaagagccaaaaaagattgtttcattaatgccgagcaacacagaaattacatacgcactcggccttggtgacaaagtggtcggtgtcaccacaaacgatacctatccaaaggaagtcaaaaaggttgagaaagtcggagatatgaatgtaaacgttgaaaaagtcatttctctaaaaccagatctcgttctggcccatgagtcttccatgtcagcatcagcggatgccatcaaacagctgaaggacgcgggcattacagtgctgactgtcaatgatgcacaatcattctccgaggtgtacaaatcaatcgaaatgatcggagaagctggcggggcggagaaaaaagccgatcagctcgtgaaaagcatgaaatcagatctaaaggatattcaagaaaaagcgaaaaccatttcaaaagacgaggagaaaagcgtatttatcgaggtttctcctgatcctgacatttatacaaccggaaaagatacgtttatgaatgaaatgctaaatgtcatccatgctaaaaacgcagctgcggatcagacaggatgggtgcaaatgacagacgaggcgatcgtaaaactcaatcctgatgcaattgttacaacggacggtgtgaaagcgaaagctgtggaaaaacgcgatggctggagcgaaatcaatgctgtgaaacatcatcgtgtatatgatgtggaccctgatcttgtgacacgttccggtccccgtctgatcgaaggggtcgaagaacttgcggaaagcatttacccggatacgtttaaggaataatcgttatgccgcatatatcattggtttctcatttttagccgtgagcatcatcttaggaatttcttgcggcagcctgcatattcctattcccgctgtttttcgtgtcttttggcatcaaggtttcggcggctctatcggttctgatgatccgatgtacactaatattatgatgaatatcagactgccgagagttgtgctggccgcccttgtgggggcggctctttctattgcaggggccgcttttcaaggattgttgaaaaatccgcttgctgatccctatacgctaggtgtgtcatccggtgcttcagtcggagctgttgtgactctgttcttaggtttgcaccttcctgtcatcggagggtttacactcccggttttgagtgtagccgcggcactggccacgatggcggcggtccttttcttcagccgcctcgttcatgcttcgatgtctgtttccaccctcattttgaccggtgtcatcaccaactcttttttaggcgcatttatttctcttatcatcgccttgacaggagacaacctgcttccgattgtgcattggctgcttggcagcgtctcaatgaggggctggagctatgttattttgtttctcccgttttttcttttgggaaccattttattgattataaacggaagggaactgaacgtgatgacatatggagaagataaagcaaagcttcttggagtcagcgttcagcagaggaagatgatgattttaatagccggatctcttttgacgggaagcgctgtggcagtatcgggtacgattggctttgtcggccttgtgattccgcatatcacaaggcttttgtggggaacggaccatcggcatttactgccgttgtccgccttgcttggggcagggtttcttgttttagccgatctgctttccagaaccatcattgagccgattgaactgccgatcgggatcattacgtccttggcgggagcgcctgtgttcgctcttattttaattcggcagcatcgcggggggagaagcttatgatgaaggcagaagggctgtcgggaggatacggcgacagccgcctaatcaacaatgtcagcttaacagtggagaagggagaatttcttggaattctcggccctaatggaagcggaaaaaccacgcttttgcacttgctgacaggtacgctgccggccaagaaaggcagggtttatctggccggaaaactgctggcggactataaaccgaaggaactggcgcaaatcatggctgtcctgccgcaaaaaatggatcaagccttcacctttactgtcgaagaaactgtagcctttggcagatatccattccaaacggggctgttcagacagcagactgaaaagggtgaagccattgtacaggaagcaatggagcaaacaggagtggccgattttgcgcaaaagccgattcgcgaactaagcggaggggaacagcagcgggtgtatttggcacaagctttggcgcagcagccgcgtattttatttttggacgagccgactaattttctcgatctggcttatcaaaaagacctgcttgatctgatcaaacgcctgacgagagaaagcggattggcagctgtcagcgtttttcatgatctgaacaccgcaagcctgtactgtgatgggctcatgtttatgaaaaacggtaccgccgggcctaagcaaaaaccggaatatgctgttacagaacaaagcataaaggcggtgtacgatacagatgtcaccgccttggttcatcaaagctcacctaaaccgatgattgtgattcagcctgaaaaagatagcgtgaagcggcagtctatcccatttgaagcattgctccaagcggggcgtgatgacattcttctgcaaacggaaatcccgcttcgaacattgtcctccacgcctatcggtgcagggttttcgtggagcaggacgctgatccataaacggctgccagatcagccagatccgatagaaggacttacggcctgtctttcagaaagcggttttcaactgcaggagacgtgtgcgatggcttcttcagaaagacttgaccgtttcgtgtatcgaacatatgaagacggagagttatccgttttcatatgcgttcagaccggcttttcgatttggattttgattaacggctatgcggcagatcaattcttcatcaaagctcttatggctgccgaagcagaacggacgaaagtgctgggagacggaggaggcacaggtgatattctcatcgccgcgactcaaactcagcaatcagaaaacatagaacagcggctgaaccaattgataaagaaagggacagctgaatgtataaaagaggctgctgagttgtttgaataagtctgtaaaggagattcagggtatgaaactatatacaaaaacaggcgataagggacaaacgggcttagtcgggggcagaacggacaaggacagcctacgcgtcgaaagctacggcacgattgacgagcttaacagctttatcgggcttgctttggcagagctttccgggcagcccggctttgaagatctgacagccgagctgctgaccatccagcatgagctgtttgactgcggaggcgatctggcaatcgtcacagaaagaaaagactataaactaacggaagaatctgtttcctttttagaaacgcgcattgatgcctatacagcagaagcgccggaactgaagaaatttattcttccaggcggatcaaagtgtgcttcgcttctccatatcgcacgcaccattacaaggcgggcagaacgaagagtggtggcgctgatgaaatcggaggagattcatgaaacagtgctgcgttatctcaatcgtctgtccgattatttctttgccgccgcccgggttgtgaatgcaagaagcggtattggcgatgtagaatatgaaagaagtgccattgtgtttcgggaccgaaacagcagcgaatcataaaaagtgaaaaggaaagccggcgtgttcaaatacatgccggctttttttgtttttcactctgtcaatttcccattttacgacaaaaaatgaaccttatgaattattgactgaaaaatggaaaaatgagatattgtaataaatagatgtaaaaaataggcaacggggggctctgatggatggtgaatttaattgaaagtgatagcatctggaagagaaatttcaattatctgtttttctcaagaatagtcaagatatccggcgatatgttcgcatttaattcaatattatggtttttaatttatgacggcaaaggtgcgatcggcactgctttattgattgctgtcacgtttttgccggaagccgttctggcgcctgtgacggggccttttatgaaacagaccacgctgaaattttggatgtacttttcagatctgacaagggcggcgattgttttgattatccctctatgtcattttgcgggcttctctccgctgtggtttgtcatgacgcttatgattgtgcattcagctactggagctgcctacaatcccgcctctatcgctttgattcctcaaatcgtcaatgaacagggcattcaaaaagcaaacgctgtgctgcaatcctccgctcaaattgtccggcttggggctgtcacattatgcggcgcttttcttacatttattagtccttcttataccatgcttatcgcacttgtgctctatttggtgtcaggttttctcgttctttttattaagtacactgcggttgaatctcaatcagagtctgcggttgttacacagagaggcacatatatcggaagactgaaacgcggctttaggctcgtcagaaaacaccagattttatatccgctcgccatttactgtatctttatgaatttcgcggctgccccatgggaagcgctctctgccgtatacgttgcggaagatttaaacggccagccgatcgtatactcgcttttaaaggccaccaccgccgcgggcgcgtttttattagggtttgtgctggcgaaagtcaaggtaaacaggtacggcttgttattcgtcactgccggcattattgaaggatttgctttctttattaccgggatgaatacctttttgccgctcgtctttttcgctgcttttacctttggtgccgcagtcagtgctgttaatgttcctgagtacacgattatccagacgtctgtggatagtgaggatcagccgcaggtttacgccgttatacatatgatctcaaatatttcgatccctgccggagctgtcatttgcgggtatgccgctaatgctttcggctcaggtaaagtgatcgctgtcggtgggattgtcgaaattattgcgggtatcggaatcttgctgtttacaaaattggccaaagcagaaaggtccgacctaattaaagaaagggaagcaagtgttcatctgtaaagggttttaaaacgccatgcctcgtgcatggcgtttttttgtgccaatgggtccggtgcgagatacgactccggtcttatataaaaatcaatctctgattcgttttgcatatcttccaacttgtataagatgaagacaaggaaaacgaaaggaggatctgcatgaaaataaacaagaaaacaataggcggattcttattaattgtatttgggatctccgtcttttttggaggaggaagcttcggctttatcatcccgctcgccatcgggagcttgatgacatacgcaggaatcaaaaggtttgccgcgggaaaaaccatcacgggaatcatcgtgggcggtatcggagccattatgctcatctgctcacttccgtttgtcgtcggaatcgcattggcggccgctatggtgtattacggctggaagctgatgaaaaacggatcagctgataacggtgtatcatcttttgatcctgaaccggcttctgctgcctaccaatctcactttgatgacgaatgggaagaatttttgaagaaaaaataatatcaatatattaggaggaatcaggtatggtattaaaaagaatcagagacatgtttgttgcgtcagttcatgaaggacttgataaaatggagaatccaaaggtgatgctgaatcaatatgtacgcgatatggaaagcgacatcgcaaaagcaaagcaaacaattgtgaaacagcacacgattgcctatcaatttaagaaaaaatatgaagaagccgctgaagtggctggcaaacggaaaaatcaggcacagctcgcatttgacgcaggtgaagaagaactggcgaaaaaggcgctgactgaaatgaagtatttagaagggaaggcggctgagcataaagcttcctatgaacaggcaaacagtcagctggctgatctgaaagagcagctggctgcacttgaaacaaagcttcaggacgtaaaggataaaaaacaggcgctgattgcgcgggcaaatgcggcgaaagctaaagagcatatgaatacgacatttgacaaaattgacagtgaaagcgcgtatcgtgaatttttacgtattgaaaatcgtattgaagaaatggaaatccgcgcgaattattcaaagtcagcggaagccggcacagaacttacacgtaaagaattcgcagacgatgtggaagcggagattgaaaaaatgcggacactttcactgcaaaaatcagaccagacaaaagcggcaaatgaataagcggaacggggaaggatttgcggtcaagtccttcccttccgcacgtatcaattcgcaagcttttcctttataatagaatgaatgagaaggatgaaaccgaatgaaaaaaatgcttggcaaactgttgatcactgccggtattctggtttttttcgccgtcgtcgtaaaagatgtgtttgctgcaggcctaggtttcataaatggcacagaagctgattcagccagcgcatcgccgcgggacattgacagcatggtcattgagtcggatagcaaggatgtccggattatagcggaagaacgaagtgacatatcggcaggcatttcaggagactcaggaaagttatttgttactgaaaacaaaagaaaactggagctgaccgtaaaggaaaaagaatttcaatttttgaatggatttaaccgttcaactcttatcgtcaggcttccgtatgattataaaggtgatctggcagtacgaacctcaagcggtgacgtgtctgtggccgggaatgaccatcttgcgctttccgggctgaacgcagtatctgcgagcggaaatacgagcgtgacggacgtccgcattcaagatctgaaagtgaaggcatcatcgggggatgtttccatttcaaataccgtctccaaaacagccggcattgatttagcttcaggggacgcaaatctggttcatgtatcaggctctcttgatgtgaaaatgacttcaggagattttaatgctgtattgaaaaaggtaaccggtcccgtatctgtcacgctgacaagcggtgatgctaatgtaagccttccccaaaatggcagctttgcagtcaatgctttatcagcaagcggtgacgtcagttcgccgtattcatttgctgataaaggacataaagaacagcatcacatcacaggcacgcaaggaagcggccggcatccaatcgacatcaaaacggacagcggggatctagcgatacggtagcactaggcagaagaaaggaggcggacaccaggaatgacaaaaaaacagcttctcggattgatcattgctttattcggcatcagtatgtttttgcaaattatcggaataggcgatctgctgttttggccgctcttttttctgattgccggctatttccttaaaaaatattcccgtgattggcttggctccgtcatgtatatctttgccgcgtttctatttttgaaaaacctcttcagcatcacctttaatttattcggctatgcgtttgccgcatttctgatttacgccggctacaggcttatcaaagggaagccgatatttgaaccgaatgagaaacaggtcaatctcaataaaaaagaacatcatgagccgccaaaagatgtaaaacatcccgacatgcgcagcttttttatcggtgagctgcaaatgatgaagcagccgtttgacctgaacgatttaaatgtctctggttttatcggtgatatcaaaatcgatttatctaaagcgatgattcccgagggagaaagtacaatcgtcattagcggagtcattggtaacgttgatatttatgtaccatcggaccttgaagtggctgtcagctcggctgtttttataggagacattaatctgatcggctcgaagaaaagcggattaagcacgaaggtatatgccgcgtcaactgattttagcgagtcaaagcgccgggtaaaagtgtccgtttccttatttatcggtgatgtggatgtgaagtacgtatgagaaaaaaaatgcttgccagcctccaatggcgcgccatccgcatgacaacgggaatcagcctgctcctttttgtttgcctgatttcctttatgatgttttactatcggctcgatccgcttgttttgctgtcatcaagctggttcggaattccgtttatcctgattttgcttctgatcagcgtgaccgtcggtttcgcctcagggtatatgtacggcaaccggttgaagacaaggattgatacattaattgaatccattttaacctttgaaaacggcaatttcgcttatcggataccgccgctcggtgatgatgaaatcggcctggctgctgatcagctgaacgaaatggcgaagcgcgtggagcttcaagtcgcatccctccagaaactttccaatgaacgtgcggaatggcaggctcaaatgaagaagtcggttatctcagaagaacgccagcgattggccagagatcttcatgatgcggtcagccagcagctctttgccatatcgatgatgacatcagccgtgctggaacatgtcaaggatgctgatgacaaaacagtcaagcggatcaggatggtcgagcatatggcaggcgaagcccaaaatgagatgagggcgctgctgctccatttacggcctgttacccttgaaggaaaagggctgaaggagggccttacggagcttttggacgagttccgaaaaaagcagccgattgatattgagtgggatatacaggacacagcgatatccaagggtgttgaagaccacttgttcagaatcgtgcaggaggccctttcaaacgtatttagacattcaaaagcgtcaaaagtaaccgtgattctgggcataaagaacagccagctccgtctgaaggtgattgataatggaaaaggctttaaaatggaccaggtgaaagcctcctcatacggcttgaattctatgaaagaacgtgcaagtgaaatcggcggtgtcgccgaagtgatttcagtagaaggaaaaggcactcaaatcgaagtgaaggtcccgatttttccggaagaaaaaggagagaacgaacgtgattcgagtattattgattgatgatcatgaaatggtcagaatggggctcgcggcttttttggaggcgcagcccgatattgaagtcatcggcgaagcatcggacggcagcgaaggtgttcggcttgctgtggaactgtcgcctgatgtcattttaatggaccttgtcatggagggcatggatggcattgaagctacaaagcaaatttgccgggagctttccgacccgaaaattattgtgctcactagcttcattgatgatgacaaagtgtacccggttattgaagctggcgcgctcagctatctgttgaaaacctcaaaagcggcagaaatcgccgatgccatccgcgccgcaagcaagggagagccgaagctggagtcaaaagtggcgggaaaagtattatccaggctgcgccactcaggtgaaaacgcgctcccgcatgaatcgcttacaaaacgggagctcgaaatactctgcctgatcgcagaaggaaagacaaacaaagaaataggcgaggaactgtttattacgattaaaacagtcaaaacacatattacgaatattttatcaaagctggatgtcagtgaccggacgcaggcggcggtgtacgcacaccgaaatcatctcgtgaattaggcggctgctatttgtttgcgcctttcgttccgaagtctctgacaatcacattgacccggtagtctatttccgcattgctgaaataatcatcatcccattttcttgaaatctttttccacttttgaggataatgaattctgacctcgtttcccagcccggttacgtccgctttgatctctttctgcagcttctctgtaataaatgacgttactgtttcgtgtactcgtttttcgactgtcttttcaatacttttaatatatgaatccttaaacgagtcttcattgggattccagtcctcagatagacgaccttcaatattgcgggtaacggtgaatttgaactttccgtccttgtatgccgtcttgatcttccgattgcttgaatatacttcataagaaaagagatggccatcgcgcttcaagtcaatgacgcctccctcgacagtgcctgaaaataagctgatattttgaacctcaatcggggtgaggtcccggtgccataatttattttttatgatagaggctccgtttatcgcgagcttgccgttttccttaccgacatgagggatgaggaatgaatcgtcagaggttaagtgttctgagatctcccccaatgtaactggctccatcgttctgatcgtcaccttattattctctgtcagatcatatatcacgttggatgcgggttcgccttcatcattcatgttaaatatatccttagttcggccgttggtgataaagacgtaggaactcctccttgttccgttgtctctgacaaactggttaataatggcgtccattccaatttgatccgcaatcacgcttttggaaagcagaatgagacgcaaatgctgtgaaaacgtaggcttatgctttaatgcagaggttctcatcatttgatggacagttttaccctttgtgatagaaagctgtgtcggatcagatgaagagccctccttggcgctgattattttcggcacgagaatttgctgtgtcagctctaaattttcatcgtcaggcttgtctagccctattccgatcactaagcttaattcctcgatattctcactgtcccagcatccggacagcaatagggtgcatataaacatacataaaatccggattttcattttgttgtaatcctcctcttgagagctacaatgaaaaagagaatgaacggaagcagaaacagggagacaaaaatatagccaagataatcgctatacatcatgacttgattggcgtcatccggccagagagaaaaataaaagaccgttatgccgataatcaccatgcttgttttagtcgataatccaaatgtcttctttagcccgttagcggcaaagtatccgtaaatgacaaatgtggtgaaaaactggataatccagaccaccagtaaaaaggattcaaaccgttcaataaatatgcctttaagctcaaaggactgaaagagagaaatagtcggccaaatcagcgttttcacctcgggagcggtcaaagctccgacaacgataatatacgtaaggatatataagataatcggaatcagaaatcctagagacgcatatctgaacgtgtatttctttttcttcatatgttcaggaagaaacagcatcacttccattcctaaaaaagagatggaaacgacggtaagggagtttgcaatgggtccaaggccttcgcctaaaacaggacgcaaattattgatatcaaaaattttaaaactgatcccgaacacaatcagcaaaataataatggttaccgttaaataaaagggaaacagccgcgacacatcgcttaagcccccaaccattaaataaatgccgcagcaaataaacgttaaaataatgacttgaattggggttctctccagcaggaaaaacttcaccatttcagccattgcccgtgtctcgaagctggctacgccgaggaaatagccgcagatcaaaaggccgatgatgctgccgatccatttcccaagcccttccttcaaatattcaaagagtgaagggtattgatgttttttctgaatgagcgtgtttaaataaatgaagaaaataaaaatgaaaccttctaatatcagcgtgatccagccgtcaggcgtattagccttagtggtcagcgctcgcggcaatgttaaaagtccggccccaagcattgtatttgcaacaatagaaataccttgaaaggtattaagtttcagtggagtctgtttttggctcatttggattattcacctcttttggtttgtttttaattgggagacggataatggagtcatccgtatttttcaggctaaagaatccgtttggcgaaaaatacggagacccaaagctcgtttgtctcgttaagtgcgtataaacgacaagcataaataaaataatgccgtatagccctaaaatagcggcggaaaacatcgaaataaaacgcagcacccggaaagacagacccattccgtattgaggaacggtaaaggatgccagggcaatgacactgacgacaatgaccaaaatcgaactgacgagattcgcttctacagcagcctgtccgatgactacgcccccaacgaggccgatcgtctgtccgagcggattggggagtcgcagtccggcttcccttagcagctcgatggtgacttccatcagcagggcttcaaatatcggagggaacggcacgttttccctgttcgccgaaatcgtgacggcgagtgcggtcggcagcagcccctgatggaaggaaacaagtgctatataaatcgatgacaaaaacaaggtgataaagatagaagcaaagcgcagcgaccggataagagatgctgaaatccagcgttcatagtagtcatccggggattgcatcaggatgccgagagaaaccggcaccagcagcacaaatggtgaactgtcgaccaaaattgccacacggccgttaaacagggctgaagatactttgtcaggtctttccgtattttgtatctgcggaaatggtgaatatttattatcttcaatgagctcctcgagcgttccgctgtcctggatatcttccagctggatatttttaagccgcgccttcacttcttttatgacggacttttttgctttgccttcaatgtacataatggctgcaggcttcagcttgttttcgccgatcatgatttttttggtgatcaatttcggatgagaggttctttgtctgatcagagcgagatttgtatcaatatcctctacaaacgctacttttgggccgcgaaccactttttcagttgtcggctctgtcaggcttcttgtttttttctttcctgtggtcagaatataggctttatccaatccgttgataaacacagcacaattgccgttgagaatcgattcaatcgttttttttgcagtttcaacaggtcttgcgtcaagctggtcaaggcgttttttgacctggtcaagcgttaaggtctcctcatctttaatcaaagttttaatggcttctgacaccttattctcatcagtcatttcactgaaatagagatagtaaaaaaccagtccgttcgcaagcatttttttgtttttcaccagatcatcgttttcttttaattttggcagcaccaatgctaaattatcgtgtatatattccttaaactctgtttgttccaatgaggtcacctcttatccaaaaccttagtagaggttatcttttcctgttaaaaaaatgatatactgtgttagagtatttcatggagtaagtttttttatgaaagcggaggatacgaagtggcacaggtaaggctagctggaaaacaagaagaaattgaacagctcattagatcatttgaacagcattatgatgtctcttatacatcaaaggagtacggcaggacaaatccaaaatacaaatattcaaaggattcccgcgtatatcttgaattaaaattaaaatctgccaagatcgaaaaataaaaaggattttttgtgtcattggcgaattatgatctattgaagcaaccgttatggagggatacataaatggaatacagaattgaacgagacaccatgggagaagtaaaagttcctgctgataaattttggggcgcccaaacacagcgaagcaaggagaactttaagatcggttctgaaaaaatgccgatgcgtgttgtgaaggcgtttgcaattttaaaacgaagcactgctctagctaataaacgcctcggcaatctggacgctgaaaaagcagaagcgattgcagcggtttgtgatgatgtgctcaaaggcaagtacgatgacaacttcccgcttgtcgtatggcagaccggaagcggcacacaaagcaatatgaacatgaacgaagtggtagccaaccgtgcgactgctttattaaaagagaagaactctgatcaaacgattcatccaaatgatgacgtgaaccgaagccaaagctcaaacgacacattcccgactgcgatgcatgttgccgctgttttggctgtttacgagcagcttgtgccggcgcttgatcagcttcgcaatacactggatgaaaaagcaaaagcatacaatgatattgtcaaaatcggacgcacgcatcttcaggatgctacgccactgaccctcggacaggaaatcagcggatgggttcacatgctggaccgttcgaaggaaatgattttggaagcgacagataaaatgcgtgcgcttgcaattggtggaacggctgtcggaacgggtatcaacgcccacccagagtttggagagcttgtctcagaagagatcactaagctgaccggccaaacgttcagcagctcgccgaataaattccacgcgctgacaagccatgacgaaatcacttatgcgcatggcgcattaaaagcgcttgcggctgacttaatgaaaatcgcgaacgatgtcagatggctcgcaagcggaccccgctgcggcatcggggagatcgtcattcctgaaaatgagccgggaagctctattatgcctggtaaagtcaatccgacacaaagcgaagcgttaacaatgatcgcagcgcaaatcatggggaacgatgcgacaatcggctttgcggcgagtcaggggaactttgaactgaacgtgtttaagcctgttattatttacaacttcctgcaatctgtgcagctgctcagtgacggcatgaattcattccatgataaatgtgctgtcggtattgagcctaataaagaaaccattcaggaaaacctgtcaaattcattaatgcttgttacggcgctgaacccgcatatcggttatgaaaacgcggcgaaaatcgccaagcttgcccataaagagggattgacgctcaaagaagcagctttgaagcttgaattgctgacagaggagcaatttaacgaaatggttaagccggaagacatggtaaaaccaaaggcgtaataggaagaacggctgctttttaagcagccgttcttctaaatatgttgctgttttaataaatatttaagctgttccgcatctttggcgagagcttcagactccgtcagattatgaatcattccttttatgatcgccagcttcggtgtttttttcttcatttctgcttcaagtatgtccaagctctccgataattcaagagaggagtttgtgtttaagctgttaattttgtcacgtaggcttttcacaattgattcagtcagcgggtcaggccgtccgtgcgtaagaggtccgaataaagagctcgcctcttccaatgtgatgaaaggcttatcgtttcgttcagacatgccttttaccatatcatcaattcgattcataatgatatcagctaattgagacggcttcacagtgtacccgagcaaaatcatgcattccaggtaaatctggctgatgccctctattaaaaaacaaagctcagcagtgtacggttccgctttttttccatagatgttcagcaggctgtcgatatgaaattgaagtgaggactggcggattttttttgcgcattgctccacttcttctgtgtaaggcagagaaccctccttcaactgcatgctgataaaatctttgtgttcaagaatgttttcatagaggacggtcagctgtttacggtaagccgttctggggctgtcgcccttcgttttaatatttaaaattcgggtaaacgttttatcataatagtagttcagcatagagagaagaagcgcttctttcgaaggaaaataaatataaaaagcgcctttagatattttgcattcttttgcgatttcctggactgatgttgagttgtatcctttttgggcaaatagttttaaggctgtttcaataatcagtttttctttttccttcaatggttccaccctttcggagcccggaggcctgctaggatatgaccatatagtcacaccgtctgttataaaattaaccttattgtaacttgtttttttatcatgtattatttatattataaattgagatgaccgaatggtcaaagctcaagcgaaagggtgaatctagaatgagagaattggacgaaatgatcagccgcttgcgaaacagaggaatcaaagtggagaaagtcaaatatccgaagcagaccttgtcagagaaaaaatgggttcatcaatgcaaacagccgctcaaaacaaattacagagattttaacggctattctttcacataaaaaaatagactgcaaaacatctacagtctattttggcactgctatgcggtatgttacacccgttttgtcattttcaattgagatagatgccttatgaagagttaaaattcgttttacgatgcttagaccaatgccgaattcgcctttcttccctttattaaaaggctcatagaggctggagagcatctcatcttcaatatgcggaccgtcatttttaatggtgatcacgatatttcgatcatcttgtttcatgctgatttctatttttgtctcagcatagcggatttgattttccaaaatgttttcgaggagtttgttccattgctccggatcgcccggcatcaaaatatcctcttctacatcaatttcccacgatagttctttccgcgcccacttcaatcgttcgatgacttcttctgtcacttccacaatactgaacatgtcgtgctgcactttttgcttcgctaaataatccagcttcgttaaatataataaatcctttatttttttctccagcttaagagcttcgcattcaataacatctacagtgttttcaaggtctcctttaggaaaaatcccgtctttaattgattgtgtatagcctctgatgaccatgaccggcgtttttaaatcatgagagatattttgcaatagagttctttctgtttcatccttttgcacaagcttttggcgcatctcttcgatggtatggcccaatttgccgatttcatctttccggtccacttttactgggtcatcccaatcctgttcagaaatccgtttgacgtgtttttcaaatgatacaagaggccttgataaatactttgcaagccaaatagccggaatccagcttaataaaatgacgacagctataataaacagaagctgtttgaacaaggtataggccaaatcgtcccgataagaatcaagcgcgtaagagagcatcatcgctgattgtccattgacggaaagtccctttttaatgacaaaaaacactttctctccattgacgtcggcgctgtaacgtttctttttagcttcctgcttatcagccagcttgtacaccttgtggataaatgaagatgacagaatgcttaaatccttgtctgaagaagcctcttcattttcaggaaggagcacgtgctgtacggagcggacagttgtcggcgccgtcgcttcctcgctgtaatagcgcctttcaatcgaacctggcaggcggtactctgtcagaacatgctgctcattttcaatcgtcgtatacgtttcattagtgaaaaaatctcgcagcgtgtttgaaaataacacaagcagtaaaatcgatatcgctaacaggatgccggatatgacaacccatatctgaaacgcgagcggcttgtttttcatgatgacatcatcctgtagccgaaaccgtaaatcgtctccaccttcaattcaggcatctttctgcgcagtctccggacgagatcatcaacgacccggtctgttccgaagtagtcatgtccccacacttttaggaggatatcctcacgagagtatggatgccctttatgatggataaataatagcagcagatcaaattcctttgacgtcaaattgatgatattcccgttttcgtcatagacctcgcgggcgtcttcagcgacccgatacgaggagacggcaatttcatttttttggacaggaggagcttccttatatacgagctgcagcagcttttgcacacggataatcagctcccgcggcaaaaacggctttgaaatgtagtcattgctgccaagctctaagccaagcactctgtcaatatccgcatctcgggcggaaataaaaatgaccggcacgtcaggatctttcgccttgatttcttttattaatgtatagccgtcggtatccggcagcatgatatcgagaatccataggtggggagacggtgtcattttctttctggcgtcttcacctttcgtaaaagatgtaatgttccagccctcattctctaaatacttcgtcagcagttcattcaggttatcctcatcttcaactagataaatggtgtatgacaaggctcttcacatcctttcaacgtcattataaactagttttaacatacggcaggcaattttcataatttcacatattcttttcatttttatcccacaatgtttgtttatgatatggttaagggaagaaaggaagagaaaaagagcgaggaagatgtaggatgatcaaacatattctattttggtgctttgcttttctcctcattattgggacaattgaacttgtacatgcgatgaatatgtaacgataaatgaataaccgttaaaggagtgtaagaacatggattatcgacgtgatggccaaaacgatcaacatcaaactgaaccttcacatacagaacagcagaatacagaaaaccagaagctgattggacattctgaacaagaattgcttgacgcgcctgtgtcgtatgaagcgggacggcaggaaacggcttctgctttagaaatggaaaagcaagaaacggctgtgaaaaaagaaaagaaacggagagccgcatggctgagcccgattttaggcggtattatcggcgggggcctcatgcttggcatcgcgccttatctgccgtcagaccaaaatcaggcgaccgaaaccgcttccgcaaataaacaggtgcagtctgataattttacaacggcgccgataacgaacgcatcaaacatcgctgatatggtagaggatttagagcctacgattgtcggaatctcaaatatccaaacctctcaaaataacacattcggcacgggaggaggctccagctcagaaagtgaaagcggaaccgggtcaggtgttattttcaaaaaagacagcgataaagcgtatatcattacaaacaaccatgtcgttgaaggcgcgaacaagctgactgttacgctatacaacggagaaacggaaactgccaagcttgtcggcagcgataccattactgatttggcagttttggaaatcagcggcaagaatgtaaaaaaagtggcgagctttggtgactcttcacagctgcgcactggcgaaaaggtaatcgctatcggtaacccgctcggacagcagttttccggtacagtgacacaaggtatcattagcggactgaaccggacaattgatgtggatacaacacaggggacggtggaaatgaacgtgctgcaaaccgatgcagcgatcaatccggggaacagcggaggcccattaatcaatgcaagcggccaggtcatcggcatcaacagcttgaaggtgagcgaaagcggcgtggaatcacttggatttgcgatcccaagcaatgatgtcgagccgattgttgaccagctgctgcaaaacgggaaggtggaccgtccgtttttaggcgtgcagatgattgacatgtcacaagttcctgaaacctatcaggaaaatacgctcggcctgtttggagatcaattgggcaaaggtgtttatgtaaaagaagttcaagcaaattcgccggcagaaaaagcaggtattaaatctgaggatgtcattgtcaaactaaacggtaaagacgtggaaagcagtgcggatatccgtcagatcctttacaaagacttaaaagtcggagataaaacaacaatccaagtgctgcgaaagggaaaaacgaaaacgttgaacgcaacactgaccaagcagacagaaagcagttcaagctaagaaaaaacaaaaagctgaacccgattaaggttcagcttttttgttaccctaaataagaggaaagcatccacacttgtttttcaacttcttcaattaatccgacaaacaagtccgctgtcgcattgtcttgattttcttcagccaggccgatcacgaatttagattcgctgctgatttgtttgtagtcgtttaccaatgcttgtaccatttctgatgctgatgtttcgtttccgccgtctgtgatagatgcatgctcagtgtattctttcactgtggcaacaggctgtccgccaatcgccagcaggcgctcagcgatggtatccactgtttcagccgcatggtcataaagttcttcaaatttctcgtgcaatgtaaagaaatgaggccctttcacataccaatggaaacggtggagcttagagtataaaagaaaccagtttgataattgtgtgttcagtgaattctcaactaatgtttgatttgtttttgcgttttcagttttcataagataacgtcctccttgtgatctgttgacttaattatatcatatactaaataaaaatcaatactaaattataataattataatttagatcagctgaatagctttttcttcaggatagactcccacgcagaccaaggaaaaagcgatcggaacagcagggtgagcttgatgccctttccgatcgggtatcgcaaattctttatgtgctgttttgttgccaattgataaatgaggtcggcaacctcttggggatctccgctttcttctccgtttttttgaacataggaaaggatctttttatagtattgatgataggctgaatcgtcagcaggcaccgacataaaatttgataatgacgttgaccagatcgatgtcttgtatgagcccggctcgatcaaagcggtttcgataccgaacggaagcagctcgatacgcaggctttcagaaaaaccttccaatgcatgcttggaagaaacatatggcgacagcgctgggaatcctgtcagtccgctgatgctgctcacgtttataatctttgcgccgccatgctttcttatgtaaggcagcacggtttttgtcacatggatcacaccgaagacattcgtttcaaattgttgtctgaaatgttccatcggcacatcctcgataaatcctccataagccgttccggcgttgttaacgagtaaatcgatcggggcgtaagcactaacagcttttccgaatgagactatagattgttcatcggtgacatcgagagctgtaatgtgaatagaatcagacacattgtgtgctgcagccaattctcgaagctgttccgctttttcaggctgtcttgatgtggctatcacgaaaaatgatcgggcaagctttacagctgccagcagaccgaagccgctggacgctcctgtcacgatggctatttttttattcatcctaaccctcctattaaactgctacagctattgtactatcctgaacacgaaatgacgcctgtaatagaaatttttatacaataattcagaattgttctataatagaacgaaagaaggaaaggggttttgtgatatggcgctgcaaggggtaggccaaagatgggatcttgattcattttttaagggcgggagccaatcggaagaattcaaaggttatattgagaagctgtcacaaagtctgcgtgcatttcaagacaggactgatgcgtttcaggtgcctgaatcgcctgaagaggctgaagggctgaccgcgttgcttgatttattcgaacagacatccgtcaagcttcagcaggccggcgcttttgttgcttgcctccaggcccagaatatcaatgatcaaaaggctatagagcatcaggcctcatgaatcggctttccgcagattttcaatcgtcgctcgttacattagatcataaacttgtggacattaatcaagacgtgtggaatgaattgttaacaaaaccgggattgcgcgatgtttcttacatattaaatgaaagaagacagagggttgccgaaaagcttagccccggtaaggaaaaactgatcggaaaccttgcggtggacggatatcacgcttggagtgacttatacaatatggttgtcgggaaaatgacgatcccgtatgaggaaaacggtgaaaacaagcaattgtctgtcggtcaggcggagaatatgatggatcatcaagaccgtactgtcagaaaaacagtatatgaacgtttccgccaagcttgggagagcaagcaagatattttcagcagcacgctgaatcatttggcgggattccggcttgaaacctataaagcgcgcggctgggagaatgtcctgaaggaaccgctgcaaattaacaggatgaaaaaagaaacacttgatacgatgtggcaggtcatcactgaaaacaagaagccgttcgttcagtttttgaaccggaaagcatccatgctcggccttgaaaaactcagctggtacgatgtcgaggcaccgatcggttctgacggaaaggtctattcgtatgatgaagccgcaaatatcattaccagccagttttcaacgtttggcaaaaagctgtcctcattcactgaaaaagcgtttcgggacggctggattgaggcggaagacaggagcggaaaaagagtcggcggcttttgcaccagttttccggacagcggggaatcccggattttcatgacattttcgggaagcgcctcaaatgtctctacccttgcgcatgaactcgggcacgcgttccatcaggaagcaatgctcaacgtcaggccgttaaaccgttcctacgccatgaacgttgcagaaacagcttcaacgtttgcagagatgatagtggcggacgcgactgtccagcaggccgagacgagggaagaaaagcttgttcttctggaggataaagtgcaaagaagcgttgcgttcttcatgaacattcacgcaagatttctatttgaaacgagattctacgaggaacgaaagcggggagtggtaccggccagccgcttgaatgagctgatggaagaggcgcaaagagaggcatactgcaatgcgttagaagaatatcatccgcttttttgggcatcaaagcttcattttcacatcacgagggtgccgttttacaatttcccttatacattcggctacctgttttctcttggtatttacgcgttggcgcttgaagaaaaagacacattcgaagagaagtatatggcgctattgcgcgatacggcttctatgacagtggaggatttggcgatgaagcatttgggcgctgacatcacaaagcgcgatttctgggagaatgccatcaagctggctgtgcgtgacgccgaaacctttttacaaatgaccgaatcttaaagaaaaagccgtggcgttaaatgccccggctttttcaattcttctctgaatgaggatttcattctctggatatacctaaaataaatggaatcctacaggggggaaacatatgcatttgatcagagcagccggggctgtatgtctcgcagtggttctgattgcgggctgccgtttcaatgaagaccagcatcaggcagaaggagaaaatacagccgtcacccagctgaagtccgttccctacagtaatttttcgcttcgtgtgagctacggggatggtgagcataaccgttatgaaggaatctatacaaagaacgggactcaggaaaaagcggaaatacaggataagctctccggtgtcaatcaggaaggagaagaagcgttagatgagatgaaaatgattttgagcgagctttccgtgacagaccaaatggctgaaacagaagtgatacacagtgtgctggcagcatttaatctggacagtcattatgatcatatcgatttaaaattgaagctgaaggacggctccatcagagaaatcaagaagtaatcttgtgataaaaaacccataaacgtcaattatgtccataaaactaattgaaaatgattttcaaagtcagtgttttctgctacaatgagggatatatgaccatatcaaatggctgaatatcggaatcatttgcattgatgacaattgacttaaaagcatgtatatagaaaacgtgcaatacatagtgctgctaaaaagccagcaaaaaggagcggttatgggtatgagtgcaatttctacagaaacgctgagcttaggatacggggatgccgttattattgatgagttgaatttaacaattcccaaaggtgaaattaccgtatttattggcagcaatggctgcggaaaatcgacacttttacgttcattagcgcgcctgatgaagccgagaggcggttcagtgctgctggaaggaagagcgattgccaagcttccgacgaaggaagtcgcaaaagagctcgcaatcctgccccaaggtccttcggctccagaggggctgacggtgcatcagctggtgaagcaaggaagatatccttaccaaaactggctgaagcagtggtcaaaagaggatgaggaagcagttgaaagagcgcttaaagcaacaaagcttgaggacatggctgaccgtgccgttgattctttgtcaggcggacagcgccagcgggcttggatcgcgatgacgcttgcccaggaaacggatatcatccttcttgacgagccgacgacgtatttagacatgacgcatcaaattgaaattcttgatttgctgtttgagctgaatgaaaaggaagaccggacgattgttatggttctccatgacttaaacttggcgtgccgctatgcgcatcatcttgtggccataaaagataaacggatttatgcagaaggccgtccggaagaggtcatcacttgtgatcttgtgcaaaatgtgttttctatgaactgtcaggttacacaggacccgctcttcggaacgcctctttgcattcctcatggcaggggcagatgcattgtccaggaagcggctttcacatcacatggataaataacgcagcgaaggagctttcaattgagaaagctccttgctgttttttcgaaaggaagatggaaaatggaacaaaaacttcaggagcagcttgatggattgctggagaagtatactgagcttctgcttggtgaaacaaacgatgagctaaaagaagaagtgaagcaatggattttgtacacccatatagccaaaagcatgcctccgctcgctaagcattggaatgcgacataccccgacgcgaagcagggcattaaagagatcattcagcatattaaggaattaaatgaagcgcatcgaaacaaacaatagccaaaaagcagtctgttcattatagcagactgcttttttgtgattcagccgttttaactggcgtaaaggaatccataaaggttctcagcgcgctgctgataaacgaatcttttcgaacaataaactctgttttcatctggctgagagcttcaggcagcgggtacaatcgaattgatccttctgcttcatgtttctgcacaaccgttcttggcagcaacgagatgccaagacctgctgtaaccccgccgataattgcttcaagcgtcccaaattccataatgaccggctgtgtgacaccgacggaacgcagccatttttcaagtgtttctcgatacgaacagcctgtgctgtaaacgagaatcggctttgtgatggcttcctcaacatcgggcacggaggcagccgaaacaactactggttcttcctcaaacgcaggataggattcgagctcaggatgatggcattcgcatccgataaacgcgccatccaattcataacgaagaactttatcaaggagaaattgcgtatgtcctgttgttaaagacagctggacgtttggatgttcttcataataagatgccagaagctttggaagccttaccgcggcggttgtctgagtgcagccgatcataagcggcccgcttggttctgcggaggatgagagcgctttagacgcttcatcaagaaggcctataattttatttgcgtagtccagcagcaattttccgcttgcagaaagtgtcatgccccgattatggcgcaaaaacagtgtggtacccagctcagcttccaattgttgaattctggccgtgacattcgattgtacatagccaagctgcagggctgctttcgtaatggtcccttcacgagctaccatttgaaacacacgtaaatctccgctttccattttgaactcctccgttcgtttactatcaatctgagtgatatctagtatctttaacaatcattatacgtaacatcaaagctggattacaatggaatcagaaatatactttagtcaacagcaaggagtggcggcaatgaatgtcttgaacaaaatagctctcgtaacggggggcggcacaggaatcggaaaagcagccagtatggaattggcaaagcgtggggcgattgtggcggtgaattattcacgctcgcaatcagaagcggaggaaacagtggaaatgattcaaaaagctggcgggcaagccttcgccatccaagcagatgtatccaaaaacagcgacgtgcaggatatgattcaagcaatcgtgaacacacacggcacggttgatattttagtcaacaatgccagcattacacggcatattccaatggatgatcttgaggctgcgacagaagacgtctaggatgagctgtatgccgtcaatgtgaaagggatgtttttctgcgcgcgggcagtggttccgttcatgaagaaaagcaaggacggggcgatcgtaaacgtcggcagcatcgcagggataactggtgccggctcatcaatgccttacgcagtatcaaaatcagcggtgcacggtttaacgaaatcattggcccacgccttagcgcctgaaatcagagtgagcggtgtagcaccaggagctgtggcaacgagatggtgggccggacgggaagaaaaaatgaaaagcatgatcggctctttgctgctgcagtgtattgctgaaccagatgatgttgccaaattgatttgttcactaattgaacaggaatcactcacaggccaaattatcacaattgacagcggacagacgctgtaaagaaagggatgcggggagatgccatttgtacagattcatttacggtcgggaagaagcgaagtgtggcttcaaaaactgagcaggactatccaccaatcgatgattgaagaaatcaatgtgccggaagatgactatttccaagtcatcagacaatatgaaaaaagcgaatttttttatgatccattttatctccaagtcgagcgtactgatgaactgatatacattcattttacactgaaacagtcaagaacaactgaacagaaaaaagcactttaccgctcaatcgcgagccggattcattccgagcttggtgtaagaaaagaagatgtgtttatcatgctggccggaaatcaggatgaggattggtctttcggaaatggaagagcccagatgattgaataaaaaaccccgcggattgatacccgcggggtgctctattaatgggaaggtgattcaacggcttttgccgccttctctttttcttgttggtcttccgctttcttatttgatagcttgataggttttaagaacaaggtgaatacggctccgactgcgataaagatcaggcccgtataaaacacgctgtggagcgaatccatcaacgatgtttttaaaatcggcacaatatgggatgagaaagccgcagggatttgtttgaccgcgtccggactgaacagtgattgcagcagcccttgcggatttgtatcaatcataccctttagctgggcggcaaacgagcttgcctgtgccggaagagagtctaaatatggaaccaatttatctgttaatagatttcctgatctcgcattcattacggctcccagcatggtaatgccgaatgttccgccgatagaacggaagaattggctggatgaagtgacaactccaagctcctccttcgaaaagctttcctgtaaagccaatgtcagaatcggcataacaagacccattcccagaccaataatcgccataaaagatgtagcgacaagcttgctcgtgtcgagatccaatgtcgttaacagcaggaatccgccggccataaccagcatgcctgtaatgatttgcggtttaatcccaattttataaacaagctgtccgccgatgatacttgtgataatcatagaaatcatcatcggtgtcataattgtacccgattcagacgcacttacaccgacaattccctgcataaagaaaggaacaaacgtaatggcgccaaacataccgatactcataaagaagccgatcaagtttagaaatgtaaatgttctgtttttaaataaatacattggcaggattggctcttttgcttttgattctacgatgataaagctgacaatgccgatcagtgcgagagcgaacaacccaagaatctgccatgaatcccatgcataatcttttccgccaaagcttaaggcgagcaggaggctgaccacaccgacaatcattgtgaaaataccagcgatatcgaagttgatcggaccagtctgctggcgtccctgtaatcccctggcaataaaaataaccgcaataattccgactggcaggttaatatagaaaacccatttccagtttaacgagtctacaatccagccgccgatttgcggcccaatcactgaagccagcccgtaaattgcgccaaagacaccttggaatttagcacgctgttttcctgtgaacaagtcaccgatgacaatcatcgccatcggcatcatgatgcctccgccgatgccctgcagtccacggaagataatcaattccgtcatgttgttggccattccgcacaaagcagaagcggccataaaaataatcaaacctgatacatagacaatgcggcgtcccaataaatcagccagtttaccggcaattggaacaatggttgttgatgttaacaaatatgcagttgtcagccaggtcatcatgctcaaaccgcccagatcaccgacaattttcggcatggccgttccgacaatggtaccgtcaagggctgaaaaaaacatggcaataattaagcctgttattaataacgttcgttttgattgtttgccttctttactcattttcatccgtttcctcttttcatgttttgcttttcatccgtttctgctgcttgtgcgagttttgctgtaatatgcgccgcctgcagcatttcctcctccgtcaaaaaggaaagatagcgcgccattatggcttttctgcccgccaaaacctcctcgaactttatgtctccttcgtcagtaagactgagatcaatcactcgcctgtcttttgtgttgtgtgttctggcgataagatttttttgttcaaggcgatctgccatcagcgtcaccgcgcttggcttcacctccatacgctcggcaatttcagaaactttgaggctgccgtgtttctttaggctggccagcacaaacagctgcgctggggtgacaccttgtttctccatgctttccagcatttcaggctgtatcttttgaaagagcgcctgaagcgataattgaatatcggacattaactgatccgcactcttcatattcatttcccctctgttacatacactgtatatatattttaatgacaaaatagttaatgcttattaaatataaataagcgtaaatgaaaagtcaactgattttacacaaaaaaaggatagatgcccgaaagaacatcgtatcctttttactaatgttgttattgctgataaggagactgctgctgaatggtctgctggaatttttgataggactgctgcagcttttgtgaatcctccgcttcaacagaataccatccatattggaacatgagatcatatagttttctttgcgctttttgtgactcatcaaaaatggattgaatatcctgataaagagactcgtggctgaattcgtgcaaggcagtgcaataagctgttgtcatgtatttttcggttgtcagcaattcgttgacgaaatctctgtcattcatttccgatgttgtcggtacaggtgtctgcgggttgctgattttttgattttgctgattcattctggcgcctccttattggatgtagccggactgctgctggcctggctgcaggtgctttaatattctttgatagtgatcatgatgcatgtgtccgacgcggtcgagttcttgctttaacgtttgatcctggcactgctgcgccatgaaatgcgcttttttcatcgcgagcaaattccagttcagcatgtcattgagatacaaatgatcctttgtcgaaataacggaaggcggcatttgagattgctgctgattatccattgtgatcctcctttggtttctgttcattttatagtttccttcagactgggagttatatacaggtgttttgaagatgacggcgggagggagtcggatgttgagacatgtgtttttattcttatctcaaaataaaacacttaccaagttcgcaaaagcatacggaacgcggcttggagcacgaaggtttgtcgcaggggatacgattgaatcggcggttaagaccgtcaaaaggctaaacagatccggtttgtgtgcaacaattgattatttaggcgagtatgcagcttcggaaaaagaagcaaaccaagtcgcagaggaatgcaagaaagccattcaagccattgccgaacatcaattgaattcagagctttcacttaagctgacctcaatcgggctcgatctttcagaagaacttgctcttactcatttgcgcgccattctttccgttgcgaagcaatatgatgttgctgtgaccattgatatggaagactattctcattatgaacagacactttctatttacaggcaatgcaaacaggaatttgagaagctcggcacggtcattcaggcgtatttgtaccgggcggcagaagatatcagaaagatgcgggacttaaagccgaatctcagacttgtaaaaggcgcttataaagaatctgcggctgtagcgtttcccgacaaaagaggcacggaccttcattttcagagcttaataaagctgcagttgttaagcgggaactacacggctgtcgccacacatgacgatgacatcattgcatttacgaaacagctcgtcgccgaacatcaaatccccgcatcgcaatttgagtttcaaatgctatacggcatcaggccggagcgtcagaaggaactcgccaaggaaggctacagaatgcgtgtgtatgtcccatatggaacggactggttcagctactttatgagaagaattgccgaacggcctgccaatgcagcgtttgtgttaaaaggaattttgaaaaagtgaaagcagccgtgggaagcagctgcattatgattgtcccatgttatgttttttatactgctgattttgacttgtccgttttccgccgccgtaatgctgagtcggaccggcatctccctttacgctcgccgcgctgactgccgctgaagacggattttttttctctcgtaccattcccttcacctccgggcttaagttgcccgacttttataggcttcatacaaaaaaataacaaattagctattgaagtcgaaccggaaatcttttaagatgaaagaagaaacgggtttcattttttttagtcaaaaaatgaatgactattcattcaatgttcaagggggatatctcatgcacaaacacattcggaaggcagccgttttaggatcgggggtaatgggttccgggatagcggcgcatttggctaacatcggaattcctgtcctgctgctagatattgtgccgaacgatttgacaaaggaagaggaaaaaaaggggctgacgaaggacagttcggaggtgcgcagcaggctgagccggcaggcgatgaaaaaactgctgaaacaaaagcccgctcccctcacatcagcgaaaaatacctcctatattacacctggcaatctggaggatgatgcagaaaaactgaaagaagcagattggattattgaggtcgttgtcgaaaaccttgaagtcaaaaagaaaattttcgctcttgtggatgaacatcgaaagactggaagcatcgtctcaagcaacacatccggcatatcagtgcaggaaatggctgaaggccggtcggatgattttaaagcccattttcttggaacgcatttttttaatcccgcacgatatttaaagctgctagagatcattccgattaaggaaacggatcctgatattttaaagtttatgacagctttcggagaaaatgtcctcgggaaaggcgttgttacagcaaaggacacaccgaactttatcgcaaaccgcatcgggacttacgggcttctcgtgacagtccaagaaatgctgaaaggcggttatcaggtcggggaggttgattcgatcacaggaccgctgatcggcaggccgaaaagcgccacctttagaacgcttgatgtggtcggcctcgatacattcgcccacgttgcccgaaatgtgtatgacaaagctgatggcgatgaaaaagaagtgtttcgcattccaagcttcatgaacgatatgctggaaaaagggtggatcggaagcaaggccggccaaggcttttataaaaaagaaggaaaaacgatttatgagcttgacccagtgacgcttacttacggcgagcggacaaaaatgaaatcaccggcacttgaagcggcaaaacaggcaaaagggacaaaagccaaaatgaaagcgcttatttattcggatgacagggccggccgtttgctgtggaatatcacttctcaaaccctgctttactcagccgagctgcttggcgagattgccgatgatattcatgcgattgaccaagccatgaagtggggattcggctgggaactgggaccttttgagatgtgggacgccatcggcctcaagcagtcagcggaaaagcttgagcagcttggagcagatatgcctggctggataaaagagatgctggacaaaggaaatgaaaccttctacatcaaagagaacggaacggtattttattatgaccgcggcgaatacagagccgtgaaagaaaacaaaaaacgaattcatttacaagcacttaaagaaacaaaaggcgtgattgcgaaaaacagcggagcaagcttaattgaccttggagatgatgtggcccttcttgaatttcattcgaaaagcaatgcgatcggcctcgatatcattcaaatgatccacaaaggattagaggaaacagaacggaattacaaggggcttgtcatcggcaatcaagggaaaaatttctgcgtcggcgcgaatctcgccatgatcttaatggaagtccaagatgacaactttttggaagttgattttgtgatccgccgttttcaggagacgatgatgaagatcaaatacagtgcgaaaccggtcgtcgccgcgccatttggcatgacgctcggcggaggaacggaagcatgcctgccggcggcgcgcattcaagcggcaagcgaagcctatatgggacttgtggaatccggtgtcggcctcatccctggcggaggaggtaacaaagagctgtacatcaaccatcttcgccgcggccatgatccgatgaatgcggcaatgaaaacatttgaaacaatcgcgatggcgaaagtgtccgcttccgctcaagaggctcgtgagatgaacatcttaaaagaaacggatcagatcagcgtgaatcaagaccacctgttatacgatgcgaagcagctggccgcatctttatacgataccggctggcggccgcctgtaaaagaaaaggtcaaggtgccgggagaaaccggttatgcggcactcttgcttggcgctgagcagatgaagctgtccggctatatatctgagcatgattttaagatcgcgaaaaaactcgcttatgtcattgcgggcggaaaagtgccgtttggtacagaggttgatgaagagtatttattggagatcgaaagagaagcgtttttgagtttgtcaggagaggcaaaatctcaagcgagaatgcagcatatgcttgtgaaaggtaaacctttacggaattaggagggagcttatgaaagaggcagtcattgtgtcaggtgcaagaacaccggttggaaaagcaaaaaaaggatcgttggccaccgttcgcccggatgatttgggagcgatttgtgtaaaagaaacgctgaaacgggcaggcggctacgaaggcaatattgatgacttgattatcggctgtgcaacacctgaagcggagcaggggcttaatatggcgagaaatatcggtgcgctcgcgggcctgccgtacacggttccggcgattacagttaaccgctattgctcttcaggccttcagtctattgcgtatgcagcagaaaaaattatgctgggcgcctacgatacagcgatcgccggcggagcagaatccatgtcgcaagttccgatgatggggcatgttacccgtccgaaccttgctttggcagaaaaggcaccggaatattatatgagcatggggcacacagccgagcaagtcgcgaaaaaatacggcgtctcccgtgaggatcaagacgcgtttgccgttcgcagccatcaaaacgccgctaaagcccttgcagaaggaaaatttaaagatgaaattgtacccgtcgaagtgacggtgacagaaatcggagaagaccataagcctatggaaaaacagtttgtgttttctcaggatgaaggtgttcgcccgcaaacgactgcagacatcttatcgacattgcgcccggccttttccgttgacgggacggtgactgcgggcaattcctcacaaacgagtgacggagcggcggctgtcatgctgatggaccgggaaaaagccgatgctcttggcctggcgccgcttgtgaaattccgctcctttgcggtaggcggcgtgccgccggaagtgatgggaatcggaccggtggaagcgattccgcgcgctttgaagcttgccggacttcagctgcaggacatcggcttgtttgaactgaatgaagcttttgcctcacaggccattcaagtaatcagggaattgggaattgatgaagaaaaagtgaatgtcaacgggggcgcaatcgcgcttggacacccgcttggctgtacgggcacaaagcttacactctcactcatccatgaaatgaaacggagaaacgagcaatttggagtcgtgaccatgtgtatcggcggcggaatgggagcggccggtgtatttgaattatgctaaagggggaaaaacaaatggcaaaaaaagcggctgacgtacaaaaaggcggcggatttttaatcgaggatgtcacatacgatcaaatgtatacaccggaggatttcactgacgagcataaaatgattgcgaaaacaacagaggattacatcgagcaagatgttctccctcatatagatgatatcgaaaaccatcaattcgagcattctgtcagactgttgaagaaagcgggcgaactagggctgcttggcgccgatgtgccggaagaatacggcgggctcggccttgataaaatcagctcggcactcatcactgagaaattttcgcgtgcgggaagcttttctctttcttatggcgcgcatgtcggtatcggttccttgccgatcgtctttttcgggtcagaagaacaaaagaaaaaatatttgcctggactcgcttcaggcgaaaagatcgccgcttatgctctgactgagcctggctctgggtctgatgcacttggagcaaaaacaacagctgtgctgaatgaagcaggaacccattatgtattaacaggggaaaaacagtggattaccaactctgcttttgccgatgtatttgtagtttacgctaaggtagacggcgacaagttttcagcctttattgtagaaaaagagttcccgggtgtctccacgggaccggaagaaaagaaaatgggaatcaagggatcatcgacaagaaccctcattctggatcaagctgaagtgccaaaggaaaacctgctcggagaaatcggcaaagggcatgtcatcgcctttaatattttaaacatcggccgttacaaactggcggttggcacaatcggcgcatctaaacgcgtcatcgagctgtctgcggcatacgcaaatcagcgccgccaatttaaaacgccgattgctggtttttcattgacacaggaaaaaatcgggacaatggcctcaaggctgtatgcgatggaaagctctgtatacagaaccgtcgggctgtttgaagacaatatgagccagttcacggccgaagatctcaaggacggccggcaaatcgccaaatcgattgcggaatacgccatcgaatgctctctgaataaggtattcggctctgaaacgcttgattatatcgttgatgaaggcgtgcagattcatggaggctacggctttatgcaggaatacgaagtagaaagggcctatagggattcaaggatcaatcggatttttgaaggcacaaacgaaatcaaccggttaatcgtgccaagcaccttcctgaaaaaagcgcttaaaggcgagctgcctttattcgaaaaagcgcagtcgctgcaggaagaactcatgatgcttatgcctgaagagcctggaagcggcgtcttagagcaggagaaatatatcgtcaagcaagccaaaaaaattgcgttgtttgctgccggcctagccgcgcaaaaatacggaaaagcgatcgatcgtgagcaagaaattctcgtgaacgtagcggatatcgtcagcaatgtatacgcaatggaatcagccgtgctcagaacggaaaaggccattgccgcacaaggcgctgaaaaagcagcgcaaaaggtgctgtacacagaaattttcgttcaagaggcctttaacgaaatcgaagcgcatgcaaaggaatcccttatcgcaatggaagaaggagattcactccgcatgatgctttccgctctgcgcaagctgacacgcgtaacgcctaaaaacgtgattcagaaaaaacgcgaggcggcggcaggcatttttgaggctgagaaatatactgtctgattggccatgagctccgcatgcgcggagctcttttttaagaagcactgttttaggtttttaaaacaaactgtgttaaaataacctcgattattttattgagggggaagaagatgtcgttaactttttactggtaccctaaatgcggaacgtgccgcaaagcaaagaagtggcttgaagagcatgggaaagaaataaacgaaatacatattgctgagcagccgccaagcaaagaagaattaaaagcgctttatgaaaaaagcgggctggatctcaagaaatttttcaacacgagcggcatgaaataccgcgagctcaatctcaaggaaaagctgtatcatatgtcagaggacgaacagctcgaactgctggcttcagatggtatgctaattaaacgcccgcttacaacagacggcgaaaaagtgactgtcggatttaaagaagaccaatttgaagaaaactgggcttaatgtaaattttttttgaaaagtgtggtatcttcttattgtagtgctgtaaaaaatggagggattcaattgagcataccaaaagatttgcgttactcaggagaacacgagtgggtaaaagttgaaggagaaaaagccagaatcggaattacgcattttgcccagtccgaactaggcgacatcgtgtttgtcgaacttcctgaagtgggcgctgaaatcaaagcggacgagccattcggcagtgttgaatccgttaaaacggtatctgagctttatgcaccgattaacggaacggttgtggaagtaaacgaagatcttgatgacagtccggaattcgtcaacgaatctccgtacgaaaaagcatggatgatcgtcgttgagccatctgacgcttctgaaattgaaaaactgatgacagcagagcaatacgaagagatgacacaagaagactaaaacaggatagccgtaaaagcaattggacacgctaacgttatgggaggtgtccaatatggctttcgacaaacaaaagctcgatgtcaccaatgacgtgacaggccgctttcaaaatggccggctctcgttatatcatgataatgagatgatcggccaaatgacaagcatgaatgaatatgagcttaagtccggttattcctttgaaaatgagaaattttataagacagccgatgtggtctctggagacgacgcaaaatatgtagattgtgactacgaaaacggctggtgttaatgttggcggtgaatttcactgccttcttttacaatctgaacatttcaaatttgacgcggcaggtgaacaagatgaagatggatgagctggaaaaggttatgattgtcgaggggaaatcagataaagagaaaatcgaaagcgtcctgaatgaaccgatgcgcattatctgcacaaacggaacaatcagccagctgaggctcgaggaattggctgacgagctttatgataaagacgtctatatattagttgatgctgatgaatcaggtgagaaattgagaaaacagctgaagcgtgaatttaatgaagcctgccatctccatgtcgacagagcctataaggaagtagcggctgcgcccaggcaccatatcgcttctgtattgctgcgtgcgaatctgaatgtccatactatttttcttgaaagaaagtcccgaggtgtatagcatgaaagaactccaagaacacgaacttgatcacattgaagatgatgtgtaccttctatatttatatactccgttttgcggcacctgccagcttgcaagcaaaatgctgacagtggtgaaagaaatgctgccggatgtcgccttctatcaaaacaatgtcaattactctccgacattcgcaaaagcgtatcaaattgaaagcgtcccttgttttctgctgtttaaaggcggaaagatggtcgaaagaggatatgcatttcattccgtttcttatttatatgagctgatcaaacaaaaatcatcttccgcatcccatttatgacatatttctcagcatatccaatgaaattgtcgttcgttttataaaggggttcttgcgacaaagagagaaatgtgtatgtatgaccaacaaataggaggttgtacatatggagaaagcggaagttttagaagatgagtatcagcatctgtttttaaaaccccttttgaatgcctcaacattgctcattaccttccaaggagaagcagaagccttaaccgtctcaataaacgaacagggagaaatgaaaaaagtttctccgccccaaacgtccaacctgaccttttacggaaaccaaacggaaattattgatttattgcacggagacatttcccttcagcaccttattcagagcggaagcctcaaagtaaaggggtcattcagggccctgttaaagctggaagccattctctggctgacaaatggattttttcagaggattttaaaaaattaaaaaataataaattattataatagtaaaagttgacatcatttattttattgacatttaatcattcgccgtgctattctacattaagaatttccggacgaaaaagactatatatttctcttatcaagagaggtggagggaagtgccctatgaagcccggcaaccatcaacactgttgaaatggtgccaattcacacgaagcgttcagctttgaaagatgagagaaaggcattttatataagcctttctgctcaagtgtgcagaaaggcttttcttttgcagaaaaaaccggaagatttcttagaatagtgttaaggcaggtgattgctttgatcaatcttcaggatgtttcaaaagtttacaagtcgaaacatggagatgtcaatgctgtccaaaacgtctcgctttccattaaaaaaggtgagatttttggaattataggatatagcggagctggtaagagttccttaatccgtctgctgaacggccttgagaaaccaacctcaggaaccgtggaagtggcgggaaccaagattaatgaagtaaatggacgcggtttaagaaaagcacgccatgagatcagtatgattttccagcatttcaatttgctttggtcgcggactgtcagagataatatcatgtttcctttagaaattgccggggtgaaaaagagcgagcggatcaagcgcgccaatgaactgattaaactggtaggtttagaaggaaaagaaaaatcttatccgtcccagctgagcggcggtcagaagcagcgtgtcggaattgccagagcgcttgcaaacaatccgaaggttcttctttgtgacgaagcgacatcagcattagatccgcaaacgacagattcaattctggatctattgtccgatattaatgaaagactcggtttgacgattgtgctgattacgcacgaaatgcatgtcatacgcaaaatctgcaacagagtcgccgtcatggaaaacggcaaggtggtcgaagaaggcgaggttctcgatgtcttcaaaaatccaaaggaacaaatgacaaaacgatttgttcaacaggtgacagagccggaagaaacgaaagagacgcttcagcaccttcttgatgatacagcatcaggaaaaatggttcagctcacatttgtcggtgagtcagctgaacagcctctgattacagagatgatcagaaacttcaatgtcagcgtcaatattctgcaagggaaaatttcgcagacgaaggatggggcttacggttcactgttcatccacattgacggggacgaggaagaagtgcaaaacgtgatccgattcattaatgacaaacaggtgaaagcagaggtgatcacgaatgtttgaaaaatacttcccgaacgttgatttaactgaattatggaacgcgacatatgaaacactttatatgacgctgatttctttactgtttgcttttgtcatcggggtcatcctcggcttgctgctctttctgacgagcaaaggaagcctctggcagaataaagcggtcaactcagtgattgcagccgttgttaacatattcagatcgattccgttccttattttaattattttactattaggttttacgaaatttttagtcggcacgatcttagggccaaacgccgcattgccggcgctggtaatcggctcggcaccattttacgcgcgccttgttgaaatcgcgctgcgtgaggtggataaaggtgtgattgaagcagctaaatcaatgggcgcgaaaacgtctacgattattttcaaagtgctgattccggaatcaatgcctgctcttatttctggcattacggttacagccatcgctttaatcggttcaacggcaattgccggagccattggttcaggaggccttggaaaccttgcgtacgtagaaggatatcagtctaataacgctgatgttaccttcgttgctactgtgtttattttaatcatcgtgtttattattcaaatcatcggtgatctaataacaaatattatagacaaacgataagggaggatttacattgaaaaagctatttttgggtgcattactgcttgtatttgcaggagttatggctgcctgcggttcgaataacggcgctgaatccggcaagaaagaaattgtcgttgcggcaacaaaaacaccgcatgcggaaattttaaaagaagctgaaccattgctgaaagaaaaaggctatacgctgaaagtgaaagtgcttagtgattacaaaatgtacaataaagctttagctgataaagaagtggacgcgaactacttccagcacattccttaccttgagcaagaaatgaaagaaaacacagattacaaacttgtgaatgccggcgctgttcacttagagccattcggtatttactctaaaacatacaaatcactgaaagaccttccagacggtgcgacaatcattctgacaaacaacgttgctgaacaaggccgtatgcttgcaatgcttgaaaacgctggattaatcactcttgattctaaagtggaaacagttgacgcaacattgaaagacattaagaaaaacccgaaaaaccttgaattcaaaaaagtagcgcctgaattaacggcaaaagcatatgaaaacaaagaaggagacgcggtcttcatcaatgtaaactatgcgatccaaaataaattaaatcctaaaaaagacgcaattgaagtagaatcaacgaaaaacaacccatacgctaacatcatcgcagtaagaaaaggcgaagaagattctgcaaaaatcaaagcgctgatggaagttcttcactctaaaaagatcaaagacttcatcgagaaaaaatacgacggagctgtgcttcctgtatctgaataagactgaaaccccggatgagaattccggggtttttttcgcgtattttcctaaaagctgttcataataaaaaggaatgttaaacagatggagggattttctttgaatcaagacagaggaagcatgcaggacgcgttaaaacaatataaacatggtttaggcacatttgaacaaaagatgccgctgatgggaagaaaatttaacgaatttactgaacagtgctttgccgggaattctctgactgaaagagaaaaacagctgatcgccctcggaattgccatcaatgctcaggacgaatattgcatgatctatcatacaaaaggctgtcttgatcagggagcgtcagaagaaaacattctcgaagccgtcagtgtggcagcggcatttggaggcggcgcagctttcagccaaggcgtgacagtcgttcaacagtgcattgaggaattcggaaacaccacgcattaagagaaggaatattccgaaaaaccattctcatttgttctgaaaggatgctttcgtctcatctgccgctatttcacgccaaatcgtttttgcggcatccaacgcagcactggtacaataaaaagcaaatatatgaagggattgattcattatttgcagcagccaggacagactgaacctcgattatacgtcagaaatggaaaaagcgatgcagctgtcacacggaattggatacgaggaatatggacgccggctggaaacaagaatgaaagtagagcggcagagagagcttgattatgaaaaaagcaagcggatttctgcgggagcttattgagaaaatcaatcttttaaaaaagggtgggaatccactctttttctttttcaatcgctttaataaagtgctgatctttgttaaacttgaggaatgtgcaaggcacgataaaaagttgtatttacttttcatttgttataaaattagaatgagaataaaatgagaataatgattatatatttttggaggtatagatatggctgcttcaacattaacgatcaaagatcttcacgttgaaatcgaagggaaagagatcttaaagggtgtaaaccttgaaataaaaggtggagaattccacgcagtaatgggcccgaacggaactggtaaatccactttatcagctgctattatggggcatcctaaatatgaagtaacaaaaggcagcatcacgcttgacggcaaagatgtactggagatggaagtggacgagcgtgcgcaggcaggcttattccttgcaatgcagtacccaagtgaaatcagcggtgtgacaaatgccgacttccttcgctcagcaatcaacgcgcgcagagaagaaggcgatgaaatttctctcatgaaattcatccgcaaaatggacgaaaacatggagttccttgaaatggaccctgaaatggctcagcgctatcttaacgaaggcttctcaggcggggagaaaaaacgcaacgaaatccttcaattaatgatgattgaaccgaaaatcgccatccttgatgaaattgactcaggccttgatattgacgctttgaaagttgtatcaaaagggatcaacaaaatgcgcagcgaaaacttcggctgcctgatgatcactcactatcagcgcctgttaaactacatcactccggatgttgttcacgttatgatgcaaggccgcgttgtaaaatccggcggtgcagagcttgcacagcgtcttgaagcagaaggttatgactggatcaaacaagaacttggcattgaagacgaaactgttggccaagaagcgtaagcgttagggggattaatatgacactaggtacaaaactatccgtagatcaggagtatctcaaaagcttttccgaaaagcaccaagaacctgcctggctgaagaacctgcgcttacaggctcttgaacaagctgaggatctgccgatgccgaaacctgacaaaacaaaaatcacaaactggaacttcacgaatttcgcgaagcatacagtggataacgaaccgctttcttcattagaagatttgactgatgaagtaaaagcgctgatcgacattgaaaacgaagataaaacattatacgtacagcgtgaccagacgccggcacatctttctctttctcaagaattgaaagacaaaggcgtcatcttcactgatattctgactgctgcacgcgagcacagcgacttggtggagaaatactttatgaaggacggcgtgaaggttgacgaacataagttaactgcacttcacgcggctcttgttaacggaggagcattcctttatgttccgaaaaatgttcaggtggagacgccggttcaggctgtttatgtccacgaaagcaatgatacagctctattcaaccacgtgctgattgtggctgaagaccacagctctgtaacatatgtagaaaactacatcagcactgtaaacccgaaagacgctgtcttcaatattatcagtgaggtcatcacaggtgataatgccagcgtgacatacggtgcggtggataatctgtcaagcggtgtgacaacttatgtgaaccgccgcggtgctgcgcgcggacgcgacagcaaaatcgagtgggctctcggcctgatgaacgatggcgacacgatttccgaaaacacaacaaacctttacggtgacggcacatacggcgatacgaaaacggttgttgtcggaagaggagagcaaacagaaaacttcacaacacaaatcatccatttcggtaaagcttctgaaggctatatcttgaagcacggtgtgatgaaggattccgcttcttctatctttaacggaatcggcaaaatcgaacatggcgcttctaaagcgaatgcggagcaagaatcacgcgtgctgatgcttagcgaaaaagcacgcggagacgcaaaccctattcttttaattgacgaagacgatgtaactgcaggacatgcggcatctgtcggccgtgtggaccctattcagctttactacctgatgagccgcggaattccgaaagaagaagcagaacgcttagtcatttacggattccttgcaccggtagtaaatgaacttccgattgaaggcgttaagaaacaattagtttctgttatcgaaaggaaagtgaagtaatgaatatcacagatattcgtgaacagttcccgatccttcatcagcaagtgaacggacatgatctcgtttatctcgacagcgcggcgacttcccagaagccgcgtgctgtcattgaaacactggataagtattataaccaatacaattccaatgttcaccggggcgtccatacacttggaaccagagcgacagatggttatgaaggagcgcgtgaaaaagtccgcaagtttattaacgcgaagtcaatggctgagattattttcacaaaaggcacgaccacatcactgaatatggtggcgttaagctatgcgcgcgccaacctgaaacctggtgatgaagtggtcatcacctacatggagcatcatgcgaatatcattccgtggcagcaggctgtaaaagcaactggcgccacattaaaatatattccgttgcaggaagacggaacgatttctttagaagacgtcagagaaacggtcacaagcaacacaaaaattgttgcggtgtctcatgtatctaatgttctcggcacggtcaacccgattaaagaaatggcgaaaatcgctcatgacaatggggctgtcattgtggtggacggtgcacaaagcacgcctcacatgaaaattgacgtgcaggatctcgattgcgacttctttgcgctttcttcccataaaatgtgcggacctaccggtgttggtgtgctgtacggaaagaaagccctgctggaaaacatggagcctgccgaattcggcggtgaaatgatcgactttgtcgggctttatgaatcaacttggaaagagcttccgtggaaattcgaagcgggtacgccgattattgcaggagcaatcggcctcggtgccgccattgattttctcgaagaaatcggtcttgatgagatttcccgccatgagcacaagcttgcagcttatgcgcttgaacgcttccgccagcttgacggcgtaacggtttacgggccggaagagcgtgccgggcttgtcacatttaaccttgatgatgttcatccgcacgatgtggcgactgtgcttgatgcggagggaatcgcagtcagagccggccaccattgtgcgcagccgctgatgaaatggctggatgtaactgctactgcaagagcaagcttttatctgtataatacagaggaagagattgataagcttgtggaagctcttcaaaagacaaaggagtattttacaaatgtcttttaatgcaaacttagatacattgtacagacaggtgattatggatcattacaaaaacccgcgaaataaaggggttttaaatgacagcattgtcgtggatatgaacaatccgacatgcggcgaccgcatcagactgacaatgaagcttgacggagacatcgtggaagatgcgaagtttgaaggggaaggctgttccatttcaatggcatccgcttcgatgatgactcaggcgattaaagggaaagatattgaaactgccctttccatgtctaagattttctcggatatgatgcaagggaaagagtatgatgattctatagatctcggggatattgaagcccttcaaggcgtttcaaaattccctgcccgtatcaaatgtgcaaccctgtcatggaaagcacttgaaaaaggagtcgcgaaagaagaaggcggcaattaaaaggattggagtgaaaatggatggctaaaaaaatgcctgatattggtgaatacaagtatggttttcacgacaaggacgtttccattttccgttcagagcgcggattgacaaaagaaatcgtagaagaaatttctcgcatgaaagaagagcctcaatggatgcttgacttccgcttgaaatcacttgagcatttctacaatatgccgatgcctcaatggggcggagatttaaactcactgaactttgacgaaattacgtactacgtaaaaccgtctgagcgttcagagcgttcttgggatgaagttcctgaagaaattaaacaaacattcgacaagctcggtattcctgaagctgaacaaaaataccttgcgggtgtttctgctcagtacgaatctgaggttgtataccacaacatgaaagaagatcttgaagcacaaggcatcgtctttaaagacactgacagcgcgctgaaagagaatgaagatattttccgtgagcactgggcaaaagtaatcccgccgactgataacaagtttgcggcgcttaactcagctgtttggtccggcggttctttcatctacgtgcctaaaggcgtgaaggttgaaacaccgctacaagcttacttccgtatcaactctgagaacatgggtcagttcgaacgtacactgatcattgttgacgaagaagcaagcgttcattatgttgaaggctgtactgcgcctgtttacacaacaaactcacttcacagtgcggtcgttgagatcatcgtgaaaaaaggcggctactgccgttatacaacgatccaaaactgggcgaacaacgtttacaaccttgtaacaaagcgtacagtctgtgaagaaaacgcaacaatggaatggatcgacggcaacatcggttctaagctgacaatgaaatatccggcttgtatcctaaaaggcgaaggcgcgcgcggtatgacgctttctatcgctcttgcgggtaaaggccagcatcaggatgcaggtgcgaaaatgattcaccttgcaccaaacacatcatctacaatcgtatcaaaatcgatttcaaaacagggcggaaaagtaacgtaccgcggaatcgtccacttcggacgcaaagcggaaggcgcccgctctaacatcgagtgtgatacgctcattatggataacaaatcaacttctgacacaattccttacaatgaaatcttaaatgataacatttcattggagcacgaagcgaaagtgtctaaagtatctgaagagcagctcttctacttgatgagccgcggtatttctgaagaagaagcaactgaaatgatcgtaatgggctttatcgagccattcacaaaagagcttccgatggaatacgcagttgaaatgaaccgtttgattaagttcgaaatggaaggttctatcggttaatgatgaaaactcctttgtttatcaaggggtttagagatagttatcaactttaaaatggccggcgtgccgaatttgattgtagaagacgaacttttgaagttcgtcttcttttatttttcagagacatatccactgttattttaatggttttaattccttatcgattagaatatttcagacctgcgccggataggttcagtttctatatcacgcaaccatacagttgcttatacttgacatgcaactaatgggttgcttatactcaatatatgaatgggaacaaagacgctatattcaaagcactcggcgattcgactcggcggcttatattagacgaattatctgaacgcaacgagctgacgttgtatgaacttacgatacgtcttattacaaagtacgacctttctattacgcgacaggcgatagctaaacacctttctgtactggaggatgcaggactcgtaacatcaaaacgaaagggaaaatatcgagtacttatattcaacaacgaaccgcttaaaaatttgctgaaaggatggatagaataattttataaaatcagaacagggcctctgataaatgtgtgggttgttttgcttgtagccagattgttagcatagtaccatgcttcattcatatcgaaggagggaaaaacagtatgaaaatcgttgttaccagtatatttgtacaagatcaagacatggcactggagttttatacagaaaaacttgggtttataaaaaaggaagacgttcccatggggaaattcaggtggataacgcttgtttctccagatgatcaagacggaaccgagcttttactcgaaccgaatgaacatcctgccgccaaggagtatcaaaagaagatattctccgaaggcctcccggccacaatgtttggcgttgcagatattcaaaaagagtacaaccgattaaaggaaaaaggcgtgacgtttacgacggaaccgacaaaaatgggcgaagtcacaatagctgtcttcgacgatacatgcggtaaccttattcaaattgtacagaagtaaccgattcagtcgcgtcctttttgtatgcagaagaaaaaccgctggccgaggggccgcggttttttactcttcttctgtctcttgattgataatttgctttacagatgatctgctgttattttctctgttcatctctcgcaattgagtataagccatatcgaattcctcttttgtcatctgctttgcggctaatgcagagcataatatagcaaaagcaattggcattgtatcaatgtgaatgtcgatatggacctctgagttgccgctgtttttgataacagattcagtagtgggtatctcttgagtatgtctgttaagaggaatgatgttttcgttcattagtcttctccgtcttgtgactgcgcctgtgcctgatcctgatctgtgttcacgctgaccacgacttttgcattaccgctgttttggacttttgccactgccgcatcgcgtctgttttcttcattttcatgacgattttcgctcatggtatcatcctttctctattgatagtgacaggatattcgataggagagtaaagagattggacgaacttcgcggtttttccacattagggcaaaaggtcgaaggaaagcatttgatttggtaaaatgaatagacattataatagaaaaggtgtttgcatatgaaatcgtacatcatcgtcggcgcagggattctgggcgcgtcgacggcttatcatctcgcaaaaacaggcgctcgcgttactgtcattgatcggaaagagccgggacaagcgactgatgcggcggcggggatcgtctgtccttggctctcgcagcgccgtaatcaggattggtaccagcttgctaaggggggagcgcggtactataaggatttaatccatcaattggaaaaagacggtgaatcggatacaggatacaaacgtgtcggtgccatcagcattcatactgacgcgtctaaactcgataaaatggaggaaagggcgtataagagacgggaggatgcgccggaaatcggcgacattacccgcttgtctgcaagtgaaacgaaaaagctgtttccgattttagctgacggctatgaatcggttcatatcagcggtgccgcccgtgtgaacggaagagcgctgtgccggtcgcttttaagcgctgcagagaaacgcggcgcaacggtcatcaaaggaaatgcgtccttgctttttgaaaacggaacagtcaccggcgtgcaaacagatacaaagcagtttgcggctgacgcggtcattgtgacggcgggagcatgggccaatgagatattgaagcctcttggcattcattttcaagtgtcatttcaaaaagcgcagattatgcattttgaaatgacagatgcagatacaggatcgtggccggttgtaatgccgccgagtgatcagtacattctgtcgtttgataacggcagaattgtagccggcgccacacacgaaaacgatgccggtcttgatgatcttcgtgtgacagccggaggccagcacgaagtattgagcaaagcgttagccgttgcaccgggtcttgctgatgcggctgctgttgaaacaagagtgggcttcaggccgtttacaccgggatttctgccggtcgtaggggccgtgccgaatgttcaaggcctgtacgctgcaaacggtttgggtgcttctggactgacgatggggccgtttttgggtgcagagctcgcaaagctagttctcggaaagcagacagaattagaccttagtccttatgatccagccggagcacttgcataataagtaagagcatgacaaacaaatataataaagctgttctagcttttcttttctgtatgtgttagcatttatctttaatgaaaaagaggacgtgaactgattttgataaaaattgatatacccgcaccgaatgtcaccatcactgaacgacagcagtcagctaatgataacgagccgaagataaaaccgattcacggattcatcgactttcaccagatcccaagggacaaaggcggcatttttatgttttacaacattcatgacgagctgctgtttgtcggtaaagccagaaagttaagacagagaattaagaagcatttcgaagacactgtttcaccgatcaaacatcacagagatgaagtttataaaattgaggtatgtgtagttgatgatccaatggaaagagagatttacgaaacatatatcatcaatacacagcactcgaagtacaatatagacaaggtattttttaaataagacgtcagtctgcggattgaacagcgaagccagagcttaagtcaagttctggcttttgatttgggcattttttcgcatatagaccctttgtctgtcatccgaataaattattgagaaatttcagaaaataatattgacaatcctacccgcggactttaatataacaatatataatgttatataacgttatataataaaaacgaggagtgaaggatttgagtcaggccacagcaaaagtaaatcgtgaggttcaagctttcttgcaggatttgaaagggaaaaccattgatcatgtattctttgtcgcatgcggagggtcttctgccattatgtatccgagtaagtatgtgtttgacagagagtcaaaatcaataaactccgatctctacagcgccaacgaatttattcagcgcaaccctgttcagcttggtgaaaagtctcttgttattttgtgctcgcattcgggaaataccccggagacagtcaaagctgctgcgtttgcaaggggcaagggcgcacttacgattgcgatgacgtttaaaccggagtctcctttagcgcaggaagcgcaatatgttgcccagtacgattggggtgatgaggcgcttgcgatcaatacaaactatggcgttttgtatcaaatcgtttttggaaccctgcaagtattagaaaacaatacgaaatttgagcaagcaattgaaggcttagatcaattgcaggctgtatatgaaaaagcccttaagcaggaagctgacaacgccaagcaatttgcaaaagcccatgaaaaagaaagcattatttataccatggcaagcggtgcaaactacggtgtcgcttactcctacagcatctgcattctcatggaaatgcaatggattcattcccacgccattcatgccggagaatattttcacggaccgtttgaaattattgatgaatccgtgccgtttatcatcctgctcggtttagatgaaacaagacctcttgaagagcgggcgcttaccttctcgaaaaagtatggcaaaaagctcactgtgcttgatgctgcatcttacgacttcactgcaattgacgattcagttaaaggctatcttgctccgctcgttctcaatcgtgtgctgagaagctatgcagacgagctggcagaggagagaaatcatcctttatctcatagaagatacatgtggaaagttgagtattgatctgaaaatgaagaaccattatgcattagactataatgttatataacattatagtctaatgtccagaggaggccaaccctttgaagaaaatgttgttgttcttgatcattgcagctgtcagtatgctcaccatcgcaggctgttcgagccaaagcagttcagcggacggaaaggtgacattgaaatttttccacagatggccaaaggagccggaaaaaagttattttgaagaggttgttaaggaatttgaaaaagatcacccagatatcgacattcaaattgaagccgttttaaatgactcctataaagataaaattaaggtcatgctgggaaccaccagccctcctgacatttacttctcttggagcgatgagtttgcttttaaatttatcagaggcaataaagcacttgatctctcgtcctactacaaaaatgacaccgattggtcatcacagctcgttcaatcgcaaattacaccatttacttatgaaaacaagcaatatggcgtaccgtggcaaatggacgctaaatcattcttctataataaagacattttccaaaagctgaatcttgatcccccgaagacgtgggatgaattaatcgatgtgtcaaaaaagctgaaagaacatggctacacaccgatcagctttggaacaaaggcgacttggacaatctcgcactatatcggcacgcttaatcagcggatggtcgatgaaaaaacacgggaaaaggactataacgccaaaacgggtgaatttactgatgaaggctacgtaaaagcacttgaaaagcttcaagagctgatgccttactttaataaacatgtaaactccgtcgaccacgaatatgtgagacagcaatttaagagcggaaagtcggcgatgatatatgcggaaacagcggaaatcaagctggttgaaccggttaatctcgggatgttcccatttcctgaaatcagcgggcagaaaggatcttcagaagcgttaacgggagcgccggaaggattcatgatctcctcaagaacaaaacatccgaaggaagcgatggaatttttgcagttcttgacgtcgaaaagaatgggcgaaaagctcgtgaaagatgtcgggaaatacagtgcagtgcaaggtacggctactgaagaaaatgcaacagccattcagcgtgaagccgttcagcatattgttgatgccaaatcaatggttccatggtttgatatggatgtcgatgttgaagtcgcagatgcgtacctaacgggcgtccagcaaatgcttggcggcgacatgacaccgcagcaggtgatgaaagccgttcaaaaggcagcaaagcaggtgagggcgtcagctgaataaatcaaagaaaaggtgaagcttcgcaccttttctttttataaaggagatgagatacccttggtcaatcagaataaaataatcccctatttgtttttggtgcccgctctcgtttttttacttttcgtttatatcccgatttttgagaatgtattcctcagcctgtttcagtggagctcattttctccggaaaaaacgtttatcggcttaaaaaactatgttgaattatttcatgatcctgtcttctatcaggcacttaccaataatgtgctttatgcagtgatctcaattgtatgccaggtatttggcggtttgattttggcggcggtgcttgaggataagctggtcagaaaatggtcgccgttttttcgtaccgttttctttttgccggttgtcatctcaatgacggtgatcgcgcttttgtttgattttatttacaatccggagacagggcttttgaatcagctgcttcaggccatcggtcttgatcagctgacgagggcctggctcggggatgacagcacagctatgctttctgtcatttttgtgtcccagtggcaatctgtcggttatattgcgatgctgtacatcgtgtcgattcaaaaaataccggatgaactgtatgaagcggcccggcttgacggcgcgggtaaaattcagcagttttttcatattactgttccccagacgaaagagatgtcttttgttgcggtggtcatgacgctgaccggagcctttacggtctttaatgagccgtacattttgacaggcggcgggccgggaaaagcgtcagaagtcttgagcacgtttttatataaaagcgcctttacaaaggatatgatgggctacgcctcagcgattgccactgtcgtgttaatcattacgcttgcattatcgctcatgcaaatgaagttctttaaaaccggaaaggaggagtaactgatgctgcctcagaagaagacagattcgttcagattggagccggtgcctgaccagcacattgaggtgaaagataagcctagacgaaaatggtatatcggagaaacgtctgtgtgggtttttctgtttctttatctgattgcgattgcctatccgcttctctggatggtgatgagcgcctttaaaaactctgacgatatttttgagcacagctggtcgctgccgtcttcgtggcatccggaaaattttgtttccgcctggaatcaggggatttcttcttattttatgaacagtgtcatcgttacggcgctgacgtgtgtgatcactgtctttatcagtgcatgggcagcgtatggcctttcccggtttgagtttaaaggaaaaggattctttttggtgctatgtcttggcggattgatgctgacgccgcaggtcagtcttgtgccgctttattctattattcagtcgctgggcctgtacaatacgtattgggcgttaatcttgccgtatgcggcttatcggatcccattcaccatcattttgatccgctcttattttctttctatttcaaaagaattggaggaggcggcctatttggatgggtgtacaagttttggagtatttttcagaattttcttaccaatgagcgtgccgattttggtgacatccggcattttgacggcttaccatacatggaatgagtttatgtttgcgattattttcatagatgatgagaatttacggaccattccagccgggctgatgcagttcagagacgcgctgcagacagactggggcgtcctgctggcggggttaacgatttcagccgcgccgattattattctatttttattgatgcagaaatattttgtccgcgggattgcaagcggcagtgtaaaaggataaaggaggaagcgctatgaaattgattgcggttggagataatgttgtagattactaccaggatcaagaaacattttacccgggaggaaatgccttaaacgttgctgtgcttgccaagcggctcgggcatgagtcttcctatatcggaatcgtcggcaatgacgaagccgcggcgcatctgttgaacgttctcaagctggagcaggtcaatgcagattatatccgccaggcgcacggagaaaacgggatggcgattgtcacccttgatgaacagggggaccgcatttttgtcagatcaaataaaggcggcattcagtcccggcttcgcctcgcgtttcaggagaaagatgtatcttttatcagcgggcatgatctgctgcatacgagcgtgtacagcaggcttgagaacgatcttccgcagctgtgcgggctggtcccggtctcatttgatttttcaaccaatcgggaggatgattatttgaggagggtctgtccttatgtgacgtatgcgtttttttcaggaagcgatttgagtgagtcggaatgcggtgagcttgccaaaacagctcatgggtacggagccaaaatggtttgtatgacccgagggggccaaggagcaatcctgtctgcgggtgatcgagtctatcatcagccgattgtggaagctgatataatagatacacttggagcgggagattcttttatagcaggctttttgactgccttttgcgtgaagcaggatataacgtatgctttgcgccaggctgctgaaacggctgcgaaaacttgcggtgtgtacggagctttcggctatggctatccttatcgcttggaggacgggggaagcagtgaaaaaacgagaatactataagcagtgtctcgttttttatgcctgttatgtgtaggggctgttgatggtaaaagtgacacggtttgtgtgcatcaaaaacaatgagcaatagattggctggtcgtttgatgtaaaagccgttttatcaatttcaaacagcgcatccccgatatcacaatccaggtatttgctttcctcctgttgggcatatacaacgtttaatagcttcgtattgtgcgtgggtacaactttgtattgctgtttcaaaatatcatgcatggagacgccgtcagcaataaaggtatcaatgccgggaaacaaatcaagcggataatgcgtcacttcaaaggtgagaggctgatcatcattatataaaatccgttttaattcaaccacagggctctcgggttggatttgaagcttttcggcgatgggttttgacgctggaatgatgtcatgggacagcacatgatgcttcggttttttgccggttgattccataaattccgagtagccgtttacagcgatcagctctcgttttaatttagggcttttaacgaacgttccctttccctgctgcctgatcagatagccttcttcgactaaatcgagaatggctttcctgacggtgatgcggctgacgttatacttggtgcaaagctcgttttcggtaggcagcttggcggttggggaatacacgccctttttgatgtcatcagtgatgatttgttttagctgaatgtataaaggtgtagaacttccgttgtttaacaaagggtagcctccttttaacctattatttatattataatgtattatgacgttataatacaaatttacattttttattttagaaatatagcaaaaatgggaatcgattactctaaaaataacagaaagaccaagttgtttccagtgacgaaataacgggtcaaaagatagggggacttttctgatggcttcattaacatttgaacacgtcaaaaaatcatatcactcacaattaaccgtgaaggactttgatttagatgtaaaggataaggagcttttggtgctggtggggccgtcaggatgcggaaaatcaacaacgctgcggatggtggctggattagaaagcatttctgaaggaaatcttcttattgatggggagcgggtcaatgatcttccgccgaaagaacgtgatattgcgatggtattccagaactatgcgctttatccgcatatgacggtttttgataatatggcgtttggattaaagctcagaaagatggcgaaacaggaaattgccgagcgggttcatgcggcagccagaattttagaaattgaacatttgctgaagagaaaaccgaaggcgctctccggcgggcagcggcaaagggtggcgcttggcaggtcgattgtgagggagccgaaggtctttttaatggacgagccgctttctaatctggatgcaaaactaagagtgacgatgcggacagaaatcagcaagctgcaccagcgattagaggcaacgatcatttatgtcacgcatgaccagaccgaagcaatgacaatgggagatcggattgtcgtcatgaatgaaggggaaattcagcaagtggcgaaacctcatgacatttatcattacccggccaatttgtttgtcgcaggcttcattggctctcccggaatgaactttttgaaaggcatcatagaacagcagcatggcgagctgtttttcacaaattcttcgatccggcttcatattcctgaagaaaaagcaaagcggctgaaggaaaagggatatgccggagaacagatgattgccggtgtacggccggagcacatcacacaaatgacaggaaatgaccagttgtttgattcagtgtttcaagcgaacgtggaagtgaatgaaaatctgggctcggagctcatagtgcatgtcatggctggggacgagcggctcaaggtccgcctggacggaaacacgcgaatcgatgcaggcgattcaatccagctctcagtgaaaatggaccacgtcgtctttttcgatgcggaaacggaagaggctgtgtattagaaaaaggtgctcctcaaaaggagcacctttttcttacggccaaatctcatccgcccattcagggtggtcgataaatggattgcggttgtgctgatatttttcataaatgatttcatttcttttccgctcgcggtcgtcaaccggatcctgcttattccattcgagcaggacagattgtttgccatgataaggagctgagccgttgcctgtcttatcattaagctcaagatcaggatagccgtcatcaccctcgtaacggacagccatgtaaaacagcatgcgggcaacatcgcctttcacatcatcgcggggctcccatgaatcgccgtcataataatttccgggtgccttcgcatattcagtgccgccattgtcaaaatccatatttcctctggcgctgttaacttgaacatcagccgggcgcaaatgatgaatatcagtaccaggtcccttgctcgtaccaaaatcgccatgggatttcgcccagacatgctcgcggttccaatcgccgacattgccgccgttcaggtttttggaacgcgattcattcgtatagagcaggatgacgttattcggatttcttgggtcttcatccgtttctttcagcgcgttccacacttcgctgtaggacagcatcgtgtgtccgctgataatacggtgcagggtgctttttagcgagtctcctgttttaccttcagccccttcataataggtatctgtgtcagcatagggtgcagcgggggcggctaatgagagaaggcttcccgttcctgaaggggaagacgccaatcggtcattaaggcttaatgtggtttgcgcgcttgctgaagctgctggcgcaagccatccggaaatcagtaatacacagacgagcggcagaaaccatgctttttttgtcatcacttgccctccttttatcagatcatatctattatctaaaattgaaataaaggatagaagtgtcattttgtatatttttcattaaaattgtaaattagtccctttggaggaggcggaaatctcctgtttccatatctttaggtcctgtttttgcgggctgccggcatttctgttttcatccgttccgcgaacatcgcctctccagcttagcttgttcatatgaaaggcattttgaccctctctttcgctcttgctggctctcttccttaccgtgttttcttttgacctttacatcaaaatagttgtgacatgtagggtgtatctggttgctggatggatactgtggctaaaaaataaacgtttttttggttaatctgtcaatgaactatcatgttgctccttctataatgaagtcaccatagcggccagaggggggagtacatggaaaagcagaagctttcagtaaaaaacagcatcacagattatattgaatggctcgcccaatacggtgcgtctgcggatggcggcgtaacgaggcttttatacacaaaagagtggatggacgcacagcttgctgtgaaaacggaaatgtcttctttcgggcttgaaacaagattcgacgatgtcggcaatgtgtttggaaggctttcgggcacccagtctccggatgaagtcattgtaaccggttcacatatcgatactgtcatcaatggaggaaaatacgacggcgcctatggcgttctggcggcaatgctcgcgttaaagcagctcaaggaaacatacggagcgccaaaaaaaacgctcgaggcggtctccttatgtgaggaggaaggcagccgttttccaatgacctattgggggtcggggaatatgacgggtgttttttcagaacaagatgcaaaagagccaagagacgagtcgggagtctccctccaaacagcgatgcatgagagcggttttggcaaaggtgtgtttcagtcagcatataggacagatatcagcgcgtttgttgagctgcatattgaacaggggaagacgttggaaatgtcaggccgggatctcggcatcgtgacaagtattgcggggcagagacgatatctcgtcacgctcgaaggagaatgcaatcacgcaggaaccacctccatgaaatggcgcaaggacccgctcgcagccagcagccgtatcattcatgagctgctgctgcggtcggatgagctgccggatgagctccgtctgacatgcggaaaaataacggcagagcccaatgtagccaatgtcataccgggccgcgtccagttttcaatcgatattcgccatcagcatcagcatgtgctggaacagtttcatcaagacatggttgctttgatcaacggcatttgcctacaaaaaggaattcgcgctgtgattgatgaatatatgcggatagagcctgtgccgatggacgaaaggctgaaggctgcggcttttgaaacagcattagaaaacggcttcagctgtgaggaaatggtgagcggagcagggcatgacgcgcaaatgatcggaaggcgctatcctgcttgtatgctgtttgtgccgagccgaggcggcgtcagccactcaccgaaggaatatacgtcagccagacagcttgagatcggcgtccgcgcactgactgatttattatacaaactggcttactgataaaggaggaatggctgtgtcaggcagaagagaattatgcaccccgttaagaacgattatgacaccggggcctgttgaggttgatccgcgtgtattaagagtaatgagcaccccggttgtcggccaatttgatccggcgtttacaggtattatgaatgaaacgatggagatgcttcgggagctgttccaaacaaaaaaccgctgggcatacccgattgacggcacttcacgggcgggaattgaagcagtgctggctagtgtgatagagccggaagatgatgtgctcattcccatttacggccgtttcggttatttgctgactgaaatcgccgagcgatatggggcaaatgttcatatgctggagtgcgaatggggaacggtttttgacccggaggacatcatacgggagataaaaaaagtgaagccgaaaattgtggccatggtgcatggagaaacatcgacaggacggattcacccgctgaaagccatcggcgaagcctgccgcaccgaggatgcattgtttatcgtcgatgcagtcgcaacgattgggggctgcgaggttaaagtcgatgaatggaagattgacgctgccatcggcggaacgcaaaaatgtttgtctgtgccttcaggaatggcgccgattacatataatgagcgggtggcggacgtgattgcagctcgcaaaaaggtggaacgcgggattgcgacacaagctgacagggcagcactttcgggaaatcggccaattacaagcaactactttgatttgagccagcttgaggattattggagcgaaagacggctcaatcatcatacagaagcgacgacgatgctgtacgccttacgtgagggagtcagactggtgcttgaagaaggtcttgagacgcgtttcgagcggcatcggcaccatgaagccgcattagcagcagggataaaggcaatggggctaagattgtttggagatgacagctgcaaaatgcctgttgtcacctgtgtcgaaattcccggcggcattgacggcgagtctgtccgtgacatgctgctggcacaattcggcattgaaatcgccagctcattcggcccgcttgcagggaagatctggaggatcggcacgatggggtacagctgcagaaaagaaaacgtgctattcgtgcttgccgggttagaggctgtgcttctcagacataacgcaggaatcgaagcaggaaaagcgctccaagcagcgctggatgtgtatgaaaacgctggccgccaggcagcggtgtaaagaaaagcttgcggaactccgcaagctttttaacgatatgatttcgtgttttctccaatctgattttcttcgtttgactctttttacaaatcctctttctatgtgtttcattttctgacaaatcatgagtcattttttcttccatcgtctattctttatacaagttacctataaaatcacgctgaactagttgtttctcacggcaattttcgagaggaggatgcggcattggggaattttcacacgatgttagatgcgctcctggaagaccaggaggaggctgtactggcgacaattgttcaagttgaaggctccgcgtatcgaaaagcaggcgcctctatgctctttaagaaaaaaggcagacggattggcttgctgagcggcgggtgtgtggaagaagatgtattccaaagaatcagtgcgctgggcgatcagctcacatcaacgctgattccctacgacatgcggtcggaggacgatctttcttggggcatgggagccgggtgcaatggcattattcatgttcatgcagagcgaatcactcaggaaaaaaggcggcactatgagaaagtgagggactgccttcattcaggcaaagctgtcacttccgttataaagattgaatcctcccattatttatttctgacggagaacggacattttgggaactggccggacgcgcctctgcaagatattcaacgtactgtttcaacgcttcatttaccgcatttcgatcaaaccactaacatgtttattcagcgaattgaaccgaagccgcgtctcattctgtttggggcgggaccggataatgtaccgctggccaatttggcggctgacacagggttttctgttatcgtgacggattggcggcccgcttattgtacatcctctctttttccaaaagcggatcagctgatcaccgcttttccggaacaaatgcttagcgaatttcaattttttccgcatgatgcagctgttgtggcaacccatcattatcagcacgatcaaacgatcatcaacttcttattttctcaaaacctccattatattggactgttgggttcggcaaaccgcacgaaacggctgctgagcggaaaacatcctccgtctcacttttacagtccggtcgggctgaaaatcggtgcggaaggtcccgaggaaattgcggtaagtgtagttgcagaaatcattcaaacaagaaaacgggtggcggttgtatgagaagcccctatctgatcggcgtgtttctcgctgccggcaaaagcagaagaatgggacaaaacaagctggctttgccgctaaaaggagaaaacataggctcactttccttgaaaactgctctgtcgtcccgccttgatcacgtgctggtcgtcgagcggacagaacatgcctcccttgagtggataggagcgccgtatcacgctccgccttttcaaaaacgctggagcctgcacgtttgccaagacgcagaaaagggtcaggggcattcagtcagcagcggggtgagaaaagcagaaagcatgggggcggacggcattgtcattttgttagccgaccagcctcagctttccgtcgatcatctcaatgcccttgtggctctggctcctgagtcatttgccgtgtcatcgtttttaggggcgttcaccccgccaatctacttctcgtcgacatgttttccttatgtaaagggattaaagggagatgaaggggctcgcaggctcctgaaaagcggacagcttggagcaggagcggttttggaggcaaaggatagcggtgagttggacgatattgatacacccgaggaatatgacatggtaaggagggcgatgtcttgaacggccaagtgacaaaagcaaggatgaatattcaattatggagaccggcagcgcttgatgaggcctattcgcttttagagaagcttgctccggatgtgtgtgccgcatcgggaagcacgctccttcagcttcagtgggacaaaggaactctaccgaaacagcaccttgtcagccttgaagggattgacgaaatgcgagggatcagcaccagtgacacccacgtgtcgatcggggggctcacatcactgaatgaatgcagaaagaaccctttgattaagagagcgcttagctgtttcagtgacgctgcttccgctgtcgctgcaccggggattcgcagccgtgccacgattggcggcaacatagcgagtaaaatcggtgatttcattccgcttctgcttgtgcttggtgctgagcttatcgtatatcaaaaggagctaatcaggctgccgcttggcgcttggctcagtgaggaagactttagaacggctatcgtcacgcgtgtcatcatcccgcgggcggagggagagcgtgtattttatcacaagcttggaaggcgccaggcttttaccggagcggctgctgttgcagctggacgttttttgaaagacggcagcattcgcctcgccgctggccatgccgatatcactcctaggagattattggacagcgaagcgaaatggatggcaccagggtgggacccgcatgagctgtacaaaacacttatccatgagctgccgttttcctcagatgtttttatgtcagcggcatacagaaaaaaagccgctgccaacgtcatcatggcagagctgatggctgagggaggggaataaatgatcatcaacaaaccgtcaagagtcaggccggatggaaggggtaaggtcacaggggaattgaaatatatgaccgatctcagctttccaggaatgctgtatggcaaggtgctgagaagtgcttatcctcatgcagagattgtgtcggtttgcaccataaaagctgagaaaatggaaggcgtgcaggccgtcgtcacacataaagacgttcccggcttaaaccgatttggcattgtcatccctgatcagccggttttatgtgaggacagggtgcggtatgtcggggatgcgatcgccgcagttgctgcggaaacggaagaaatcgcggaagcggcgctggagctgattcaagttgagtataaagagctggaagtcatggattcaccagaaaaagcgcttcggccgaatgcgcaaagactgcatgaggacgggaatatcctgcaccgcgcatttttttcaaacggtgatgtggaagaagggtttcaagcatctgacacagtctttgaagaaacctatgagctgccgcggcagatgcatacgtatatggaaacggagggaggtgtagccgttccggaagacgacgggggttttacgatgtatgcaggaacccagcacggctataaagaccgtttccagcttgcccgtatttttgatattcctgaagagaagatcagaattgtgtcaagtccgatgggcggctcgttcggagggaaggatgagctgaatattcagccgtatgctgcgcttttggccctgaaaagcggacgccctgtcaaaattcatcagacacgaaaggaatctgtacgttctggcattaagcgccatccgatgaagattacgataaaaacgggtgcagatcattcgggaaatctattggcgcacgacgtgaaaattgtggcggacacaggcgcttacgctacgctcggaccggctgttcttgatttttctgtcgagcatgccgcggggccgtaccgtattccgaatatccggactgaaggaatatcagtatttacgaacaacggggtggcgggggaatttcggggctttggcggcaaccaaatcacatttgcactcgaaacccatctcgatcgtctcagcggcatgcttggcatcgacccgctcgagctgagaagaaaaaatatcagaaaaccgcatgacttggggccgcttgagcatcgaattgcaccaactgacggagcggcacaggtgttgaatgccatatctaaatctcccattcttaaaaaaacaagccggaactgcgggtatctgcaaagaggcacgggagcggcaattacaatgcacggcggcgggctggggtttggccgaatggatgcggcaggaggccgtttgtctctttcgagtgaaggcaaaatcactgcttcgtttggatttgaagaatgcggacaggggattctagcagcgattgaacagattgtcatggaggagctgggttgtgccgcagaggatatttccattgttattggggataccgcaaaagtgccgaagtcaggctcctccacagcatcccgcggcacaagcatggtgtggcacgcgatccagcgtttgaagaagccgtttctagctcagttgaaaaaacgggcggcagaatggagcggctgttcagcggaaaatcttattcccggcgctgcaggcttgcgtgacaaaaacacaaaggcgctcgtggtgacgtataaggagctggctgaaaaaggccctttggcagaggaaacggcctttgactttccaacaacgcctgatcctgtggtgggcggccatttcctctactcatttggagcggctgccgttgaggtggaggtagatctgttaacaggcgatgtcaaattgatagattgtgagcacgctattgcggcaggtccggttgtcagtccgcagggatatcgaggtcaaattgaaggcggcgctgccatggcactcggctacacactgatggaggaagcgaaaatgacggatggccgttatgctgcggaaaatctcgatcactatttgattcccggaatcaaagatgttcctgacatgaagctgattgcaatagaagacttaatgaagggagacgtatatggaccgcgcggtgttggtgaaatcggaacaatcgccatcactccggcgattgtaaaggcagtacatgatgcggtcggatgctggataaacaagctgccaatttcaagagaagagttgcttgaagcgatcgacagaaaggggctgaagcaatggacataaaagaggccgggccatttcctgtaaaaaaggaacagttccggatgaccgtgaatggtcaggcgtgggaggttgctgccgttcctacgacacatctgagtgacctgcttagaaaggaatttcagctgaccgggacaaaggtgtcctgcggaatcggccgctgcggagcctgctctattttaatcgacggaaaactggccaatgcgtgcatgacgatggcctatcaagcagacggccattccatcacaaccatcgaggggcttcaaaaagaagagctggatatgtgtcaaaccgctttcctggaagaaggcggcttccaatgcggctactgtacgccgggaatgatcattgcgcttaaagcattgtttcgggaaacccctcaaccttctgacaaagatatagaagaagggctggcggggaatttgtgccggtgtaccgggtatggcgggattatgcggtcagcttgcaggattagaagagagttgaacgggggtagacgggagtccggcttttaaaagccggacttttttagcctcagtcagacagcgcgatcaagacgcagaagcgttgtgggaaaacacacgataaatctcgtagaacttgacagcttctggattacaaaaagattagtgaacacatagcaaagacgccataaaaacttcttatggcgtctgtcggacagggaggtgttggatacggcggaggcaaggaaagttaaacttaataattaaagatagctgctccaacaatgatcaacaaaatgaatagcaccacgatcaaagcgaaggagctcccgaaaccgtttgagtaaccagagtttccactgtatccaccagaattgtagaatcccataatgtcacctcctttagtggagataggataagatatgccaacgattattttcgacatagatttaagtctaaaaaagaaaaaatgaatattttgtctaaaggtgtaagagagaacgcgttatcaaaactattaaaaacgcagcaattgtcttcagagtattttttcgagaaaaaacgcggtctgtttataggattggagaagggagctcggctgctaagagctgacttattagtttgaaacctcgatttataaatgaaaggactacagggtatttttctcgtaggcaattatcctgaaaaatataggtgaatgtttattctagctgttgtttcactaagtgtggggatcacttcaagtactgtcctaggatcaaaagttaattgaagtgcaaaaagaagcccgccggtgaggcgggcttccttcttaactccccctatacacctgataaccaaacggcgacagcaagagcgggatatgataatgtgcatctggatctgctagctgaaaacggacggtgacgatggttaaaaacggctgatcggctgcgttcatgtttttactcgcaaaatagtctcctgcatgaaattccatcacatactctcctgacatcagctcttcaccagccagcagagggacatcgaccctgccgtcattgttagtgtatacctctttcataatactttcgcccagccgcttcaatccaatttttacgttcgccgctggtttgccgcaggttaaatctaaaatatgggttgtcagttttcccatcaggctttcaggctccgacatttttcagcggctttctgtttttctttctcggcgtcttctcttgtcacggtaaaatgttggaaaccgtatggcgggcgcggttcggtgtagacttttccttttgagcccgggatttcttcgacaaccgtatcccacgtgtgattttgagattggaagctgacatcagtgagctgcgggaacctcgctaatattctgcagccgatatgatagattaggttttggattgaaggggtttcgagctcgtgaaaaacggtgctcgctaagtcgcggacttgttcagccgcaacgtagcgtgctggatcagaagcgtatgagtcatttgtattttcatattgccagctgatgtttaaatagacaaacagcgggcggttgccgtcttccgggagagtcgtatattcgtcccggatgaagccgacgaaggagttgccgctcaccttgacgagctgaagatccatgatttcgctgtattgctctgtaatcgttatggtattcccgcttcgttctgctttcagcacagagcggcttcgttcattacgcgatcttctgaagacgaggcggcttgtgctgagctctttctcctcgtatgcaggcattgcttcaaacggaatgtcttcgccagtcagagtgatcgtgtccatatgagaataggtatctaaaaatcggtgagctacatagtgtaggaacccctcggttgtcgttccttcataggatgcgagatggcgctggataaagtttttcattgaatccgttgccacgacgagagtgttgtctccgtctgtaaatgatggcaggaaggcttctccgccaatttcgcatgtcacatcaacgccgacaacggtattatctcttccggcaaaagatgattccgggatttgcttcactccagtgagcggttttaaatacgttcggtatgcaaatacatttcctttgccataagacatggttcttttcatttgcgtctctcctttttcagtgatgatgtcagccagacgaaagcgggcgattcggtaaatttctataagggcctgctggaactccgtttctcgttcgctctcaagccttgccagcagggcttggtgaatgtcctgtttcgtctttcccttcaccgctaaaataaaaggaaagccgaagcgatcataatagtgttcattcagcatgagaaactcctcgtattcctgctgttctaatttgccgagccctgcgttctgctgctctcgtaccgagtcatcgctcattgttttctttgttccgagccggggatgctttttgattaaatcaagctgtgtctcgcgatccgcagcttttacaatgccagtcattttgcggtgaagatcagaaagggacgaaaacggccgtagtgctgcggatctctccgcaatccatgaagagtgttcaaaaatagagccaagtgtgtctgtcagtgtttgtgtgtccatttggttcaggtcatccattgtgaacattggcatcttcctttacgtttttatgtctgcgctattcggctgtttggtttgaaaaaaagcgtgcagtgcaatggccgtcaaactgccgatcacaattccgcttcctgccaagacagaggccgcgcccgaaagagatgaaaacaacgcgggaactgttgtagcgccaagccccaagctgacggaagaggcgataatcagcaggttgccttgcgaatcaaggtcaacgctggatagcattttgatcccgtaagaaatgaccatgccgaacatgacgatcattgcgccgccgagaactggggtggggatcactgttgtcagggccgctgcttttggaaccagcccgatcgcgaccagtatgattcctgtgatggcgatgacgttgacacttttcatctttgagagctgaacgatgccgacattctgcgagaaagctgtatagggaaacgcgttaaataagccgcccagcaaaatcgcaaggccttctgcccggtagcctttttccagatccttctccgacagcctgcggtttgtgatatcagcgagggcaaaataaacgcctgtcgattcaacgaggctgacaattgcaacgagaagcatcgtgacaacagccggcagctcaaaggttggcggtccgaaataaaacagagacggaacatgaagccaagacgcctccaaaacctcagaaaaatcgacctttcccatgaaatatgcagccgctgttcctgcgataagaccgagtaaaatcgctatggagcggataaagcctttaaagaaataaaacagcaataagataaaagctgtgacgccaaacccgaggagcacgttgtcgagtgagccgaattctttgcttccttcacctccggccaggttattcattgccgttggaatcaggctgatgccgatgatcatgacgactgatccggttacgacaggcggaaaaaaacggacaagcttcccgaagaagcccgcggctaagacgacaatcagtcctgcggcgataatggcaccatatatcgctgggacaccgtaagtgcttccgatggaaatcatcgggccgactgcggtaaacgtgcatccgagcacaacgggaaggccgatgccgaaatatcggtttctccagagctgcaaaagagttgccgccccgcacataaacaaatcaatcgcgattaaatacgtcagctgccccgcattcagcccgatcgctgctccgacgatcaacggaacgagaatggctcccgcatacatggcaagcatgtgctgaagccccagcatcattagctgtaaggcattgtgctgttccttcatcttttttacacctctttttctaatgcgagtgtatgttctaataccggaagttctgtttgctgtgctgttaattcttttttgtcgcgcaagctgaaaaatagattcaaaaagatggcggttaggcttccggtgatggtgccgtcactgaccagaatccggatcggagcggggaattcagcaaaaatcccgggggccgtgctggcgccgatgccgagtgcgattgagcatgcgatggtcaggaggtggtattgatttttgagatccgctgtgctgagcattttgacgccggaggcaatcaccatgccgaacatgacgacggtcgcgccgccaagtacagcagcaggaacggcagatgcaagggcggcaatcttcggaatcagtccgagacagacaaggatacagcctgcggtaacgacgatgtttcttgttttcactttggtcagctgcaataagccggcgttttgcgcaaaggtattataaggaaaggcattgaacagcccgccgatgagaatggcgattccttccgctcgatagcctttgacgagatctttgtcagttaaaggtctgccgcatatctttccgattgcgtaaaaaacgccggttgattccacaataatgacgattccgacgatcagcatcgttaagatcggaccgatttcaaacgcaggggctccgaagtaaaaaggcttcgggatttggaagaacggtgcttctgtaacagaagaaaagctgactttgcccatgatcgctgctgccgctgttccggcggcgatgccgatcagaacggacagtgttcgggcaaatcctttgagaaagcggttgaggactaagatcagaacaaggacaccgacagagagaagaaggttttcgagcgaaccgtattcggggttggcgctgccgtttattttttcgccgccagccatatttttcacacctgtcggaacaagtgaaaggccgatcaaggtcacaacggtacctgttacgacaggaggaaataacacagtcagcttgccgaaaaaacgcgcaaacaaaaagatgaacacaccggccgcaatgatggaaccataaatcgcgtgaatgccgtaattgctgccgattgcaatcattggggtgacggccacaaatgaactgccaagcatgacgggaagcccgatgccgatgtatgttccgcgcaaggtttgcaaaagcgtagcgacgccgcatgttaacaggtcaatcgccaataggtaggacagctgttcagttgttacattcagcgccctgccgacaagcaggggcaccaaaatcgcacctgcatacatggcgagcacatgctgcaggctaagtgtaaacaccttaaacgatctttttttcactatagtccctccctgtatgtgaactttagtaacataatatcgttccggtcgaggggtgtcattggatacagtagctgaaaaagacaggtgtgattgctgaaagtgacgaaaaacgattcgttttgtaagaaaatgtaacaaactttagctgatcagccgctgcatacgtaatgcaagccgcaaacgcatcgttgtttcaggatcttttaagcttttccccagaagctcttcgcatttttcaaggcggtatatgaccgtattgcgatgaacgtacagacgctttgccgtctctgaaatttggcagtgtgtctctaaatagacggaaagcgtatgaagcaggctttgatcctcctgctgtttttcagcgaggctctgaagcgtggagttgtaaaatttcttcaaatcctcaactgggagcaagcgcagaagctcaggcacatctttggcgtgatacacctggataaatgcggtgcttcttgacaaatgccccgattgcagagcatcagaagcttctgtgaaagcgtcgggaacatcaatgagcttttggcagatattgctgatgccaaaggacacggttcgtttaaattgagcgctgacctgtgtttgaaactgttctaaaaagctgatcaccgaggcgtgcatttcactccagctgtctgtcgcctcgattagaataatgccgacatttcctttcataaagaagtgaggtggaaacgggaaggctgataattcaccttcaagaaattcgaatacgctgtcggaagcgagctgattttctgtaaagctgattgattcgtcattgcgatcgagtttgccggcgatgcacatgtatttttgatcccagcgcagcttgaattctttcgcccggtttttgatttcgtcatctgaagaaaaggtccgctcaataaaattgttgaaaaactcattgcgggcccgccggctgaactgcttcagcgcattttccttcagcagttcaaaggaaatgacgttggccgcttgttcaatcgtgaggatcaatcctttgtcgcctgcctgcaccatgtcgggtatcagcaggtagccgcagtttttttcgtgattataaataggcaggacagaatatgttttctgatctgagattgtagagaaacaagtgaaaaatggcccggatacggtattcagggtgcctttcagcttttcggtctcaactgaaatctgatgagacgcagacagcattttggcatgctggtcaagcagcagcacgggaagctgaaggatgtctgacacctttttgaggagggattgcagccccttgccgctcataatgtggtttgtgaattttttgtgcgcgtaaatggcttgctgcagctcgttagaacgcatatcgagaatatggctgagtgtggcattcacaatatcgccgagtcggatgtgttccggaagctcaatgatcggaaacgcatatgaatcggccagttcgatgatttccttcgggatatcttccagatagcgctttgttttaatgccgaggcccgcgcagccgcgttttgccatttgccgaatcagttcagataattgatgcgggtgatccttcaggtgataggcggtggtgacgagcaattcattcttatgcaaaaagtctacgatatccggagcgtccatcatattgacatgctgaacctctctttcccctcctgcttttccagcgattaaattggcgttttcaaaagccggtattttcatcacatcaagaatattcatagcgcattctccttttctataaaaacattggttaaggtgaataattttcaataggaattctagcggttttgctgatgtaatacgatcatagtagcagtaaactgttgaaaatagaactggttgtgttacataaactgacatggaaaatcgtcatcctgacatggggggatcaatatggcttacgatatggtgataaaaggtgcgaaggcagttacgccagatggcgttatagaagctgatattgtagttcaaaacggtgtcattgccgagataggttctgacattgaagcaagcgggacggaaatcatccaggcagacgggaaatacgtgtttcctggtgtgatagattgccatgttcattttaatgaaccgggcagggaggattgggaggggtttgaaacaggttctcaaatgatggccgcaggcggttgcactacctattttgatatgccgctcaactgtattccatcaaccgtgacggcagagcatcttctcgcaaaagctgagctaggcaggcaaaaatctgccgtggattttgcgctatggggcggccttgtgccaggccatatcgaggacatccgtccgatggctgaagcgggagcgatcgggtttaaagcgtttttatcaaagtcaggcactgatgagttccgctctgttgatgaacggacattgctcaaaggcatggcagaaatcgcggctgcaggaaaaatcctcgctctccacgcggaaagcgacgcgatcacaagctacttgcagatggttttggccaataaaggaaaggtggatgcggatgcgtacgccgcctcccgcccggaggaagcagaagttgaagcggtgtatcgcacgattcagtatgcgaaggtgacaggctgtccggttcattttgtccatatcagcacggcgaaagcggtccggctgatcagagaggcgaaacaggaaggtcttgatgtttcggttgaaacatgtccgcattatgtcttgttcagccatgacgatttacggcaaaggggctctgtcgcaaaatgcgcgcctccgctccggtcacggcaatcaaaagagacgctgatcgagacgctcattgccggggacattgacatggtttcctcagaccattccccttgccgtccatccttgaagcgggaggataacatgtttttatcatggggcggaatcagcggcgggcagttcactttattaggaatgctggaactggcgcttgagcatcagattccatttgaaaccatcgcagaatggacagcggcggcccctgcaaaacgattcggccttcagaaaaaagggcggcttgaggcggggtgtgatgcagatttcgtgctcgtcagcatggagccgtacactgttacaagagaatcgatgtttgcaaagcataaaaaaagcatttacgaaggacatacatttccctgcagcatttcggccacttacagcaaaggccggtgcgtgtacaatgatggggaaaaagtcactgaaattgacggagctctggtcgttccttcgtaagcccggcggattttaccgccgggttttttgatttcctccgttctagtttttaaaatctcatcaacgtggtatctttttttaaaggaggcggaggcaatggagcatgtcaaatacatacttaagcaatcctggtcgcgccattcgagctctaaatggacggaagaatgcccgtcatgcggccaatgcggcgtgacggcattggtgattcaagaccatttcggcggcacgattttcaaaacaagagtcgatgagagctggcatttttataacagcatcaatggtgtggtgtacgattttacgagtgagcagtttcaggcgcctattgaatatcagcacattccttcctcaagagaagaggcgtttttagatacgaatgaggaacaatatcagcatttgcgtgaggcattttcccgccatatgaacagcatttccgaggaaacctgaaaacacgtgtgataaactggaagagaggtgaatgagtgtgatttatatcggactgacgggatggggggatcatgacagcatctatccgccgaaaacggccagccagaaaaaattgcaggcctattcctcccattttccgatcgtggaattagacgcgagcttttacgcgattcagccggcgcgcaataatgaaaagtgggtgaaggaaacgcccgaaaccttccaatttatcgtgaaagcatatcagggcatgacagggcatcagcgcggcgaaattccctttgactcaaaagaggagatgtttgatgcgtttaaggtgtctttaacgccatatttacatagcaataagctcgccatggtgctgtttcaatttccgccgtggtttgactgcaagaaggagaatgtcgcctatttgagatggtgtaagcaccaaatgggagatattccttgcgcgcttgaattcagaaaccgttcctggttctcgccgccattttatgagcagacgctttcatttatgaaagcggaaggctggattcacagtgtctgtgatgaaccgcaaatcggagaaggcagcgttccgaccgtgttgcgcgcgaccgatgaaaacaaaacgctcgtcaggtttcacggacgcaacaagcagggctggatgaagcctgatggcgggaaaaactggcgggaggtcaggtacttataccgctacaaccaacaggagctggaggattggaaaaagcacctgaatgaattgcagcagcaatgtaaggatgtttttgtcctgttcaacaacaattccggcggtgacgctgcggataatggcaagcagatgcttgaactgcttgatatcgagtacagcggacttgctccgagacagctcgatttattttagaaaagaggttttgattgatgtcgtttgtgattttggtcgtactgggattaatcgcaggtacggtaggaagtctgatcgggcttggcggcggaattgtcattgtgccatctctgatgtttttaagcacagtgacgcagctgtttcaggatgtgacgccgcaggttgcgattggaacttcgcttttggtcattatttttacgggcctttcttcaactttggcttatattaaatataaaacagttgattataagagcggactcattttctttatcggttcgggtcccggcagcatgatcggggcttacgtgtcaaagctgttcaattcaaactcgttttccgtttggtttggcatttttatgattctgatttcattatccttaatgctgaaagcgaaagcccggccaatcaacaaagcgcacaaaggaattatccggacatttcaggatgatgccggtgagccttatacgtactcatatcaggcctctgtcggtattgccattgcctttgttgtcggttttttaggcggacttttcggtataggcggcggatcactgatggttccggcgatgatgctgttatttctgtttccgccgaaggttgcggtggcaacgtccatgtttattattttcctgtcttctatgacagggtctgtttcacatatgatttccgggcacgtcaattggctgtacgccctcgcgcttgtgcccggcgcttggttcggcggaaagcttggcgccgccatcaacagaaaaatgcagacgaaaacgatcgttatgatcatgcggatcgtattgattttgatcggctgccagctcatttatgaaggcattttcagctgaacgattagggagagatattatgaaggagaagctccgcttatatcatacaaatgatttgcacagccattttgaaaactggccgaaaattgtagattatatcgagcagaaaagaaaagagcatcagtcagacggcgaagagacgctcgtttttgatattggcgatcatcttgatcgttttcaattcgtgacagaggcgacattcggaaaagcgaatgtcgatctcttaaaccgccttcacattgatggagcggcgatcggcaataacgaagggattacgcttccgcatgaagagcttgctgccttatatgatcatgctgaatttcctgtcatcgtctctaacctgtttgataaaaatggaaaccgtccgtcctgggcggtgccttaccatatcaaatcattgaaaaacggtatgtccattgctttcttaggtgtaactgtgccgtattatcctgtatatgacaagctgggatggacagttacggatgcccttgaaagcataaaggaaaccattctggaagtgaaagggcaggctgatattatcgttctgctgtcacatttaggcattcttgatgatcaagcagtggctgaagcggtgcctgagattgatgtaatcctcgaatcacatacccatcatttgctcgaagatggacaagtggttaatggggtactgctggccagcgccgagaaatacgggcattatgtcggctgtgtagaaatcacggtggacagcgtacagcgaagcatcaacagcaaaacggcttctgtgcagaacatggcggaatggacaggagaatccgcagaaactaaagcgtttctcaatgaaaaagaacgtgaagccgaggagaaactgtccgatgccgttgcagagcttgcacaagatgctgaggtgaagtggtttgaagaatcagagctgcctttgcttttggcatacgccttaaaggaatggtgcgagacggacatcagtatggtcaattcaggtgtcattctcggtccgctaaaagcaggtcctgtgacaaagctggatctgcaccgcatctgtccgcatccgatcaacccggtggctgtccgcctgacgggagaagaactgaaggaaaccattgtccatgccgcttccgaacaaatggagcagctccggatcaaaggactcggcttccgcggagaagtgatggggaaaatggtgtatgccggcgttgaggtagaaacgaaacggctcgatgacgggatcacccacgtcactcggatcacactgaacggggaagatattgaaaaacataaacaatactccgttgcggtgcttgatatgtttacgctcggcaaactgtttccgttgattcgcgacgctgcagaaaaagaatattttatgccggaatttttgcgggatctgcttgcttggaagcttgcacaataaggcagtcagcccacaacaagctgtgcccttcatcataaagtgatgaatgaagggagtggttgacgtggtaaacctgacaccgatcatgatagaaggacagccttttacagctgtgacagtaaagcttcccaaaacgaattttatggccgtcgccaatgatcacggatacattatgtgcggcgcgcttgatgtggcgctgctgaatgaaaaattaaaggagcgcggcatcgtggcgggacgcgcagttggtgtccgcaccattgaccagctgttagacgcacctttagaatccgtcacgtacgctgcggaagatcttggcatcaaagtcggcatgagcggcagagaagcgcttttaaaaatgatgaaataaaataaattggccccggctattactatgtcccctcttacaagcatacattgtgatatgtaaggggggattttcttgccaagatatcgcggcccttttcgcaagagaggacctttgcctttccgttacgtgatgctcctgtccgttgtcttttttatcctgtcaacaacggtcagcctttggatgatcaatggctcgatcaaacctgttttaatggacatcggcgagatggaaacgaagcgtatagcgacagaggtgatccaggattcgattgaggactatatgtctgacagtgaaaatatgaaagatatgtttcaaatgaattctgatgaaaacggaaacttaacgacaatcgattttaatacacaggttgtaaacagtgtgaaaacaaaagtgacaaagcagcttcaggctcatttgaaagagatggaaacccataccggacacagcggcgccagtgaaaacattatgatcaacattccgctgggacaggtaaccggcaacagccttcttggaaacctcgggccgaaaatcccggtccggttcaatttaatcggtgacgcttttacagatgtcaaaaccaaaatcaagccgtatggcataaataacgcacttattgatatcagcatctttgtcgaaattaaagtgaaggtcatcattccatttgccagcaaaaccgctgtcgtcacaaataatgttcctgtatcgattaaagcagtgcagggcgaagtgccgcagttttataatggaagcggcggctcgggtgtcacgccttctgtccagcttccgagcagcaaagaaaacggtgccgattcaaaaaaagaaaaaagcagcaaataagccgcctgttgaagaggcggctttttgttacttctttttttggtattcatatcgctcccacgccctcaaatgcgggtatggatcaaatgaccattcggttcttccgttatctttgtacatgccatagtgcagatgcggcgggaacttcccggcggttcccggcgggccgtatccggagctgccgactgatccgatcacttggccaggctcaacgatttgtcctgttttaatccctttggcaaacccattgagatgggcaaaataatgatacgtattgttaatgtccctgatgccgattctccatcctccgaagcggttccagcccttcatttcaactacgccgtaacatgtggatttgacaggaaggccgtaatgggcaaagatatccgtaccttcatgaatccgccttccaccgaagccgcgggcatctccccacgtgcttcggtagctgtaatcggttctgatcggaagcgggaatgcatgctcgcccagatcaatatggccgtaggctttaaacagcttcatgaattcagatataatccccactgtctgatcacgccggtaataattccaaagcccgatccggatgttgtcttcatctgtgccatacgacagtaagtattggctgaacgtatacaagatatcttcatcgttgctgacctcggctttcccgtctccatcgccatccattccgattccgtcaaacactttaatgcttaacggcgcatcgtctttcggattcgggttttcaggcccgctccagatatcatcgggtatatagatgctgatgattcccgccttttcaggcagatctttccggttgctccgcacgttttcttcgtattgatcaacagcggcgagcgcataccaagggatctgcgtcacagcttcgattttatgatataattccatccgtttcgacagcactggatctgaaagtttttttccagacgcagaaggctcaaatgcaaacaaaaggagaagaagagcggataacaaaactttcacaaaataatctcctttcatattgaatacacatagtttgcggcaacccggcttaaaaatgtcagtaatcatcttcccttgtcgagaaatttttcctatgttaaagtgtctaaagaaaagactttctttagttagaaaaacattatttttgttgcagaactaaaacctgcacctttctcgttttcagaatgtttcgtgtcagaaattgagtatattggatattggagatgatgggaattggcaaagaaagacgaacacctcagaaagcccgaatggcttaaaattaaattaaatacaaatgaaaactatacagggctcaaaaaactcatgcgggaaaacaacctgcataccgtatgcgaagaagcaaagtgtccgaatattcatgaatgctgggcggtcagacgtacagcgacatttatgattttaggttctgtttgtacaagagcatgccgtttctgtgctgtcaaaacaggccttccaactgagcttgatctgcaagagccggaacgcgtagcggattcagtcgcgcttatgaatttgaaacacgcggtcattacggctgttgcgcgtgacgatcagaaagatggcggggcaggcattttcgcggaaactgtccgtgcgatccgcagaaaaagcccgttcacaacaattgaggtgctgccgtctgatatgggcggaaactacgataacctaaaaaccttgatggatacacgcccagacatcctgaatcacaatatcgaaacggttcgccgcctgacgccaagagtccgcgcgcgtgcgacgtacgaccgttcattggaatttttgcgccgtgcgaaggaaatgcagcctgacattccgacaaaatcaagtatcatgatcggactcggcgaaacaaaagaagagattattgaagtaatggacgacctcttggcgaacaacgtggatattatggcaatcggccaatatctgcagccgacgaagaaacacttgaaagtccaaaaatactaccatcctgatgaatttgcagaattaaaagaaatcgcgatgcaaaaaggcttcagccattgtgaagccggtccgcttgtccgttcctcttaccatgcggatgaacaagtaaacgaagcatctaaaaagcgtcaagcacaagcataatgccaaaacgccagatcatctggcgtttttgtcattcctatcgattttcatgtcctgacgcgtttctccattggcattttcattctctgagacagggcttccttgcggggaggttttcatttcttgaatcgtccccgacatgatctctctaatatcccttgaaccagagccgagattgctgtaattttcgacggattgcatatggtttggattatcggaaatatacacgtgatagtatcgcggtatcacagaagccgctgtttttttcacctgatcggcggtcagctcccggtttttagaatcggttttgtatacgacaagcgcttctcggtcagtcaccaatgtcgcagcatcttgaatatgggggagctgaaccgttaaacttgatatcatgtgagcggtttcttcccggttcatcaccggcgttttctgctgttctccgtcaaattgttctttttgatagcggacatagccaaattgttcgttctcattatgcctgttaaaagcctcgttgcggtccgacacatgaatgggtttggtttgattctgcgtctgattccggacattttgggcattatccaatcctgcgcctccgcacccggataatagtccggtcagcaggcagaggctgacagcggttcgtttcatttatcaatccctcctcatgtgtagggtagccaaatcgcatgatttattctttagcaattgatggggacggggcaatgaattatgataggaatgagtgaaaaaagaggtgagatcatgattcttattcaaaatgccgaatttgaattggtgcacaatttcaaagacggcttcaacgaagaggcttttaaagcccgctactccgatatattaaataaatacgattatattgtgggagactggggatacggtcagttaaggctcaagggcttctttgacgaccagaatcaaaaggcaaccttcgaaacgaaaatcagcacattagatgaatatatttacgaatactgcaatttcggctgtgcgtattttgtcttgaaacggatcagaaaataaatatacacaaaggggatgctgtcatgtattttgttgacagaagcaaaatcgaaaaaacactagggttcttcgagcaccagctggcgctatttgactcacaaacagactggcagtctgaaatcggggaattggcacttcagcgtataggccatctgttaatcgaatgcattttggatacaggcaatgacatgattgacggctttattatgcgggacccgggcagctatgacgacattatggatatacttgttgatgagaaagttgtcacggaaaaagagggtgatgagctcaaaaaattgatcgcctaccgcaaaacgttggttcaacagtatctgctcgctgacagcggcgagctttacaggctgatcaaggcgcatcaaacagctcttcaggacttcccgaaacggatcagaagctatttggaaacagagctaggacctgtttccgcgtttaaataacaactggaaagccacaggagtgttggatatgaaaacatataaagggtatttaattgatttagacggaacgatgtacaatggcacggaaaaaatcgaggaggcgtgtgaatttgtcagaacgctgaaagatcgcggcgttccttatcttttcgtgacaaacaactcttcgcgcacaccgaagcaggtagcggacaagctcgtgtcttttgatattccggcaacagaagagcaggtcttcacgaccagcatggcaactgcccagcacattgcacagcagaaaaaagacgcgtctgtgtatgtgattggggaggaaggaatccgccaggcgattgaagaaaacggcctgacatttggcggagaaaacgcggattttgtcgttgttggcatcgaccgttccattacatacgaaaaatttgctgttggctgcctggcaatcagaaatggcgcccgctttatttccactaacggagatattgcgattccgactgaaagagggctcctgccgggaaacggctcactgacatcggtgttaaccgtatctacaggtgtacagcctgtatttatcggcaagccggaatcaattattatggagcaggcgatgcgcgttctcggcacagatgtgtctgaaacactcatggtcggcgacaactacgccactgatattatggccggcattaacgcgggtatggatacgctgctcgttcacacaggcgtaacgaaaagagaacatatgacagacgatatggaaaaaccgactcacgccattgactctctgactgaatggattccatacatttgaaaaaagggcgccctaaaagggtgcccttattctgtatgccgcgcgcggtgagcaagtctgcttgaagccgcggcggaaatcgctccgacgatgtcatctaaaaaggtatggcattcaccggttgatttatcattcaatcgtttaaggattccgggtttttctttgtcgatgtaaccgtagttcgtaaacccgatcgatccgtaaatgttcacaatggaaaatgccagaacttcatctactccatataggctttcatctatttccagcatcgtttgcagcggttcagacaattttttctgctcagcaagaacatccaattcaatgccc

(The sequence listing continues in the following parts.)

What is claimed is:

1. A method of treating one or more symptoms of halitosis in a subject in need thereof, the method comprising orally administering to the subject a nutritional supplement, dental supplement, or food product comprising a bacterial fermentate mixture, the bacterial fermentate mixture comprising:
(i) a first fermentate of a first bacterial strain comprising a 16S rDNA sequence with at least 97% sequence identity to the nucleotide sequence of any one of SEQ ID NOs: 1-4; and
(ii) a second fermentate of a second bacterial strain comprising a 16S rDNA sequence with at least 97% sequence identity to the nucleotide sequence of SEQ ID NO: 5.

2. The method of claim 1, wherein the bacterial fermentate mixture comprises:
(i) a first fermentate of a first bacterial strain comprising a 16S rDNA sequence with at least 97% sequence identity to the nucleotide sequence of SEQ ID NO: 1; and
(ii) a second fermentate of a second bacterial strain comprising a 16S rDNA sequence with at least 97% sequence identity to the nucleotide sequence of SEQ ID NO: 5.

3. The method of claim 1, wherein the bacterial fermentate mixture comprises:
(i) a first fermentate of a first bacterial strain comprising a 16S rDNA sequence with at least 99% sequence identity to the nucleotide sequence of any one of SEQ ID NOs: 1-4; and
(ii) a second fermentate of a second bacterial strain comprising a 16S rDNA sequence with at least 99% sequence identity to the nucleotide sequence of SEQ ID NO: 5.

4. The method of claim 1, wherein the bacterial fermentate mixture comprises:
(i) a first fermentate of a first bacterial strain comprising a 16S rDNA sequence with at least 99% sequence identity to the nucleotide sequence of SEQ ID NO: 1; and
(ii) a second fermentate of a second bacterial strain comprising a 16S rDNA sequence with at least 99% sequence identity to the nucleotide sequence of SEQ ID NO: 5.

5. The method of claim 1, wherein the bacterial fermentate mixture consists of:
(i) a first fermentate of a first bacterial strain comprising a 16S rDNA sequence with at least 97% sequence identity to the nucleotide sequence of any one of SEQ ID NOs: 1-4; and
(ii) a second fermentate of a second bacterial strain comprising a 16S rDNA sequence with at least 97% sequence identity to the nucleotide sequence of SEQ ID NO: 5.

6. The method of claim 1, wherein the bacterial fermentate mixture consists of:
(i) a first fermentate of a first bacterial strain comprising a 16S rDNA sequence with at least 97% sequence identity to the nucleotide sequence of SEQ ID NO: 1; and
(ii) a second fermentate of a second bacterial strain comprising a 16S rDNA sequence with at least 97% sequence identity to the nucleotide sequence of SEQ ID NO: 5.

7. The method of claim 1, wherein the bacterial fermentate mixture consists of:
(i) a first fermentate of a first bacterial strain comprising a 16S rDNA sequence with at least 99% sequence identity to the nucleotide sequence of any one of SEQ ID NOs: 1-4; and
(ii) a second fermentate of a second bacterial strain comprising a 16S rDNA sequence with at least 99% sequence identity to the nucleotide sequence of SEQ ID NO: 5.

8. The method of claim 1, wherein the bacterial fermentate mixture consists of:
(i) a first fermentate of a first bacterial strain comprising a 16S rDNA sequence with at least 99% sequence identity to the nucleotide sequence of SEQ ID NO: 1; and
(ii) a second fermentate of a second bacterial strain comprising a 16S rDNA sequence with at least 99% sequence identity to the nucleotide sequence of SEQ ID NO: 5.

9. The method of claim 1, wherein the first fermentate disrupts a biofilm of one or more canine oral microbes.

10. The method of claim 1, wherein the second fermentate reduces abundance of one or more volatile sulfur compounds (VSCs).

11. The method of claim 1, wherein the nutritional supplement, dental supplement, or food product reduces abundance of one or more VSCs in an oral microenvironment in the subject.

12. The method of claim 1, wherein the nutritional supplement, dental supplement, or food product reduces, in an oral microenvironment of the subject, abundance of one or more microorganisms that produce one or more VSCs.

13. The method of claim 1, wherein the subject is a dog or cat.

14. The method of claim 1, wherein the subject is a dog.

15. The method of claim 1, wherein each of the fermentates is present in the nutritional supplement, dental supplement, or food product at an amount of 1 to 500 mg.

16. The method of claim 1, wherein the bacterial fermentate mixture is present in the nutritional supplement, dental supplement, or food product at an incorporation rate of 0.01% to 10% w/w.

17. The method of claim 1, wherein the nutritional supplement, dental supplement, or food product is in the form of a gelatinized starch matrix, extruded or injection-molded dental stick, extruded or injection-molded dental chew, chew having a soft interior, powder meal topper, water additive, dry kibble or food, wet food, frozen food, liquid spray, peanut butter spread, or soft jerky chew.

18. A method of treating one or more symptoms of halitosis in a dog in need thereof, the method comprising orally administering to the dog a nutritional supplement, dental supplement, or food product comprising a bacterial fermentate mixture, the bacterial fermentate mixture comprising:
(i) a first fermentate of a first bacterial strain comprising a 16S rDNA sequence with at least 99% sequence identity to the nucleotide sequence of SEQ ID NO: 1; and
(ii) a second fermentate of a second bacterial strain comprising a 16S rDNA sequence with at least 99% sequence identity to the nucleotide sequence of SEQ ID NO: 5.

19. The method of claim 18, wherein the first fermentate disrupts a biofilm of one or more canine oral microbes.

20. The method of claim 19, wherein the second fermentate reduces abundance of one or more volatile sulfur compounds (VSCs).
